United States Patent Application Publication US 2021/0002706 A1 - sequence listing, part 2

SEQ ID NO: 4637 - DNA, 1071 bp, Citrobacter freundii
atgacaatcgagtactttgcaacacgcattgcaaaacatatttccgtgcaggcaatctggccggatggcaggacagaaattattgccgtccttccacgggatgccctgtcagggctggtaacacgaaataatcaactgattcatatagcctttgacgccatgggcacccgtaacagagaaaccgtcctgattgataaacaggagcataacgctaaccagatacttacagctattgattcctgcctgcgccttgaatatctgatggaacgccgcttcagcagaacacctttgttccgtggcataatcgccagcgttgtgctgttcgtaatggcaacgattggcttctctctgttccgctatgttgatcgtgtattctgggatgatacaacgcctgaagcagtacagacagcaggtgagccacgactgcttccccctcacctgaatcacactgtgccattaaatgaaggcattcaactcccggttcccccgaaaaaagacgtccaggtaccggagaaaacaatcacaagcaaaaatccggaagccgcagctgcgcgacataatctggctactgttctgaagcggaacgccgatcggggcatgtttaccatcaacctgtcatccggtcatgaacgaaccctgttcgcatttctcgatcctgcctgtcctaactgcagacttctggagccggccttaaaacgcctggccagcgacttcaatgtcgttatctacccggtttcagttattggtggagaggaatccaccgaccgtgtggcaccactgctgtgtgaaaaagatgctcagaaacgtgctgccggctggcaccgactgtattccgcagataacggaatgatgacgccatcagaagaaacaacgcctgcagatgaaacatgcctgaaagcagccagagctgcgattgatgttaacaatgtcgccttccgtaagttcggatttgccggtaccccatgggtgctgtccgacacgggctggcatctgcctactggaattctgcaggaaactggcacgcttaatttattcctgaaaaccaccgacagcgagtctggccatgagtga

SEQ ID NO: 4638 - protein, 356 aa, Citrobacter freundii
MTIEYFATRIAKHISVQAIWPDGRTEIIAVLPRDALSGLVTRNNQLIHIAFDAMGTRNRETVLIDKQEHNANQILTAIDSCLRLEYLMERRFSRTPLFRGIIASVVLFVMATIGFSLFRYVDRVFWDDTTPEAVQTAGEPRLLPPHLNHTVPLNEGIQLPVPPKKDVQVPEKTITSKNPEAAAARHNLATVLKRNADRGMFTINLSSGHERTLFAFLDPACPNCRLLEPALKRLASDFNVVIYPVSVIGGEESTDRVAPLLCEKDAQKRAAGWHRLYSADNGMMTPSEETTPADETCLKAARAAIDVNNVAFRKFGFAGTPWVLSDTGWHLPTGILQETGTLNLFLKTTDSESGHE

SEQ ID NO: 4639 - DNA, 252 bp, Citrobacter freundii
atgtcagaaaagtggagtaaagaattcgactcttgctttcaggtggggagcatagaagaaattgcagatgctctcgagaaacgcagcggaagcgaggaaaatgcgttagccatgctggcaatgacagccttcacactcatgacccgacgtggtatctgcgaaatgcagaacgtggcccccgatggcaaaggcattcggctggagctaatcggcttcagggaaaatgaaacaataccggatacgcttcattga

SEQ ID NO: 4640 - protein, 83 aa, Citrobacter freundii
MSEKWSKEFDSCFQVGSIEEIADALEKRSGSEENALAMLAMTAFTLMTRRGICEMQNVAPDGKGIRLELIGFRENETIPDTLH

SEQ ID NO: 4641 - DNA, 297 bp, Klebsiella aerogenes
atgttaaagcaggtgtatgaaatgaaagtccagattttaaacaataactgtgaagtcgtttggtcatacgacatagccgcccatgtagatcagagcggcgatagctgggccaatgggaaacatcagattatggctggagttgtattctctttacgccgtgctttagaacaggctgaagtctttccatcaggccctgaatggaaatggcctttttctatttgtccaaattcggagagtacatttcagaaaattggtcagaaagtcgcactcgaagagcatcagccaactgtttcctga

SEQ ID NO: 4642 - protein, 98 aa, Klebsiella aerogenes
MLKQVYEMKVQILNNNCEVVWSYDIAAHVDQSGDSWANGKHQIMAGVVFSLRRALEQAEVFPSGPEWKWPFSICPNSESTFQKIGQKVALEEHQPTVS

SEQ ID NO: 4643 - DNA, 153 bp, Klebsiella aerogenes
atgacttttgatgaaaaagaacttgataatgcaattaataaaatcatcgtaacgtcgctcttttcctgtctcagcgacactcagcaaaaacagttctacgaatcggctttcaacatgattgaagtggtcaacaaaaactggccaccgagttag

SEQ ID NO: 4644 - protein, 50 aa, Klebsiella aerogenes
MTFDEKELDNAINKIIVTSLFSCLSDTQQKQFYESAFNMIEVVNKNWPPS

SEQ ID NO: 4645 - DNA, 255 bp, Acinetobacter pittii
atgacgtcaagtcatcatggcccttacgaccagggctacacacgtgctacaatggcgcatacaaagagaagcgacctcgcgagagcaagcggacctcataaagtgcgtcgtagtccggattggagtctgcaactcgactccatgaagtcggaatcgctagtaatcgtggatcagaatgccacggtgaatacgttcccgggccttgtacacaccgcccgtcacaccatgggagtgggttgcaaaagaagtaggtag

SEQ ID NO: 4646 - protein, 84 aa, Acinetobacter pittii
MTSSHHGPYDQGYTRATMAHTKRSDLARASGPHKVRRSPDWSLQLDSMKSESLVIVDQNATVNTFPGLVHTARHTMGVGCKRSR

SEQ ID NO: 4647 - DNA, 435 bp, Citrobacter koseri
atggataaacctacagactggcgctccggaacccgccggatattttctaatgaatttaaacttcatatggttgaactggcttcgaaaccaaatgccaatgttgcacaactggcccgggaacatggcgttgataacaacctgatttttaaatggctacgcctctggcaaagagaaggacgtatttctcgtagaatgcctccaactattgtaggccctacagtatcacaatcttttccggcctctccgactctggttccagtggaacttatcgacaccccgcgctgtgctacagatgctcctgctccggaggcattatcagttgcttgtgcagcttcctgccatgtggaattccattacggtaaaatgatgctggaaaatccttcaccagagctgctcacggtgttgatccgtgagctgaccgggaggggacgatga

SEQ ID NO: 4648 - protein, 144 aa, Citrobacter koseri
MDKPTDWRSGTRRIFSNEFKLHMVELASKPNANVAQLAREHGVDNNLIFKWLRLWQREGRISRRMPPTIVGPTVSQSFPASPTLVPVELIDTPRCATDAPAPEALSVACAASCHVEFHYGKMMLENPSPELLTVLIRELTGRGR

SEQ ID NO: 4649 - DNA, 351 bp, Klebsiella michiganensis
atgatttcactcccatcaggtacccgtatctggctcgttgccggcgttactgatatgcgtaaatccttcaacggtctgggggagcagatacagcatgtgctggatgataaccccttctccggtcacctgtttatcttccgtggccgacggggagacacgattaaaatcctgtgggctgatgctgatggtctgtgcctgttcaccaaacgccttgaggaaggtcagtttatctggcctgcggtgcgtgacggtaagatatccattacccgctcgcaactggcaatgctcctcgataagctggactggcgtcagccaaaaacatcccgccttaacgcactgacaatgttgtaa

SEQ ID NO: 4650 - protein, 116 aa, Klebsiella michiganensis
MISLPSGTRIWLVAGVTDMRKSFNGLGEQIQHVLDDNPFSGHLFIFRGRRGDTIKILWADADGLCLFTKRLEEGQFIWPAVRDGKISITRSQLAMLLDKLDWRQPKTSRLNALTML

SEQ ID NO: 4651 - DNA, 321 bp, Citrobacter freundii
gtgatcccgggcagcccattcacgtttccacagtgcctgttcagcgatctgagtcagggtctccagcagttcagcagggacggtcacctggcggttttctctcacgttattgatgatctccatcgccgcaccggaagaaataccggattcagtccgctggtcttccgggatgtcctccaggcgcgccaggacagtcctgatttcatgatcggacagggaaatatccattccgtcagcgagggcctgaatctcttccggggaccagataaccagcatcagcggcgtgtctcccgaatactttgctgccagcgcccggcatag

SEQ ID NO: 4652 - protein, 106 aa, Citrobacter freundii
MIPGSPFTFPQCLFSDLSQGLQQFSRDGHLAVFSHVIDDLHRRTGRNTGFSPLVFRDVLQARQDSPDFMIGQGNIHSVSEGLNLFRGPDNQHQRRVSRILCCQRPA

SEQ ID NO: 4653 - DNA, 390 bp, Shigella flexneri
atgagtacagagttaaatagcggtactgtcggtggttttggtcacatgggaccaaatgacccctacaatgatggtcatagcggctctggaagttcgggaggtagttttaacggtggtggtaatggtggccatgataatagtagtggttcatcttatactgcatcctttggtctcatcactggccgacacccgataactgtcccaggtacgaagaatattaattctgtcgatctttctgctgtcattaataacattatacatcatgaaggtgcacgcaataacatgtacctagatactgcgaacaatgtaagagtgggagtgacgggcactggctggcaatgtctagcaacggcaggcatttcggctgagggtaaaagaactttccgctaa

SEQ ID NO: 4654 - protein, 129 aa, Shigella flexneri
MSTELNSGTVGGFGHMGPNDPYNDGHSGSGSSGGSFNGGGNGGHDNSSGSSYTASFGLITGRHPITVPGTKNINSVDLSAVINNIIHHEGARNNMYLDTANNVRVGVTGTGWQCLATAGISAEGKRTFR

SEQ ID NO: 4655 - DNA, 558 bp, Shigella flexneri
atgaggaaatcagtgttagagcaggatgttagctctttgattgagaaaataaaagaaagtgattatgaaataccaaaaagctctgatgtaatgaaaattatattaaaaagaatacaagtggtaataattattcagttggtaatgattttatgtcacttcatcatctacagatacgatcatgaggcattaattggtataagcattttgtctgcaggtggaattttgtttttctcagccgtgtttgtcccttctttatatcaacctgtcagcataatgttgtcgattaatgaggtggataaaggtgattccctaattgtaaaattgttaatgagaaagcttaaacagtactggaaatttcttgtggttataaacctgattataggtgtaggtttactactctctggtgaaggggttatttcggggcttggtttttcatggtttgttacatatctcatctgcatgatgtcgtttcaaatgtcgttatccagatatatgaccccagcagtggtcagtagtttatcgaaaattaaagagcttatttcggcatccccgaaataa

SEQ ID NO: 4656 - protein, 185 aa, Shigella flexneri
MRKSVLEQDVSSLIEKIKESDYEIPKSSDVMKIILKRIQVVIIIQLVMILCHFIIYRYDHEALIGISILSAGGILFFSAVFVPSLYQPVSIMLSINEVDKGDSLIVKLLMRKLKQYWKFLVVINLIIGVGLLLSGEGVISGLGFSWFVTYLICMMSFQMSLSRYMTPAVVSSLSKIKELISASPK

SEQ ID NO: 4657 - DNA, 174 bp, Citrobacter koseri
atgacccggctgatagttttagtctttagctgttgcattttgtttatgaaacagttcacggaacaccggataaatatcatcctggtcgcggatgtgctgcatcgcaaagttgtcgaaagtagattgcagatgctcatattctcgcacacaatgtctgatgtgcacgacgggtaa

SEQ ID NO: 4658 - protein, 57 aa, Citrobacter koseri
MTRLIVLVFSCCILFMKQFTEHRINIILVADVLHRKVVESRLQMLIFSHTMSDVHDG

SEQ ID NO: 4659 - DNA, 234 bp, Klebsiella aerogenes
atgcagacgttcgccagtggctctctgcttcaggctgccgttcaggtgatacaggttgcagggcaacatcccgaccgactccgccagcaccctgacacaggaaaaaaccgccgtcagtcgcatggcccgctggctgctgatctgctttccggtataggtgtcgtaggacaacccgatatcatccgccagctctgctggcgtggtcaccggtgcgtcactttttcgttgaaataa

SEQ ID NO: 4660 - protein, 77 aa, Klebsiella aerogenes
MQTFASGSLLQAAVQVIQVAGQHPDRLRQHPDTGKNRRQSHGPLAADLLSGIGVVGQPDIIRQLCWRGHRCVTFSLK

SEQ ID NO: 4661 - DNA, 300 bp, Klebsiella aerogenes
gtggtcagacagcgtgtcttctttctcgtacagcatggctctgccaaccgccataatcagcgcaactgcaccgtcaattttgttttccgcctgctctttgacgggcttcaccacatcatcgttacccggaatggttttgccgaccacgttgccgatacactaggtcatgatgggattgccatcatgatgaaagcgccccgattcaattgccgcttccagctctttcatcgggtcggacatgttggtgtagttctgaatgatagtgatggggttcaggtcttcatcagcaaggtcatgtga

SEQ ID NO: 4662 - protein, 99 aa, Klebsiella aerogenes
MVRQRVFFLVQHGSANRHNQRNCTVNFVFRLLFDGLHHIIVTRNGFADHVADTLGHDGIAIMMKAPRFNCRFQLFHRVGHVGVVLNDSDGVQVFISKVM

SEQ ID NO: 4663 - DNA, 153 bp, Escherichia coli
atgtcccacgctgtggacggtacttacattaaggcacaacaggacaaaatggtcaattcttcgttatgtaaaaaaacgtcagtggatacatattttaatgttatggaagttaatttaattatttacaatgatgatgtaataatgatgaattaa

SEQ ID NO: 4664 - protein, 50 aa, Escherichia coli
MSHAVDGTYIKAQQDKMVNSSLCKKTSVDTYFNVMEVNLIIYNDDVIMMN

SEQ ID NO: 4665 - DNA, 861 bp, Klebsiella oxytoca
atgaaaaatattctcgctatccagtctcacgttgtttatggtcatgcgggtaacagtgcggcagagtttccgatgcgccgcctgggcgcgaacgtctggccgctgaacaccgttcaattttctaatcacacccaatacggcaaatggactggctgcgtgatgccgcccagccatttaaccgaaattgtgcaaggcattgccgctattgataaattacacacctgtgatgccgtgttaagtggctatctgggatcggcggagcagggtgaacatatcctcggtatcgtccgtcaggtgaaagcagcgaatccgcaggcgaaatatttttgcgatccggtaatggggcatccggaaaaaggctgtatcgttgcaccgggtgtcgcagagtttcatgtgcggcacggtttgcctgccagcgatatcattgcgccgaatctggttgagctggaaatactctgtgagcatgcggtaaataacgtcgaagaagcggttctggcagcgcgcgaactcattgcgcaagggccacaaattgtgttggttaaacacctggcgcgagctggctacagccgtgaccgttttgaaatgctgctggtcaccgccgatgaagcctggcatatcagccgtccactggtggattttggtatgcgccagccggtaggtgttggtgatgtgacgagcggtttactgctggtgaaactgcttcagggggcaacgctgcaggaggtcctggaacatgtgaccgctgcagtctacgaaatcatggtgaccaccaaagcaatgcaggaatatgagctgcaagtggtggctgctcaggatcgtattgccaaaccagaacattacttcagcgcaacaaagctctga

SEQ ID NO: 4666 - protein, 286 aa, Klebsiella oxytoca
MKNILAIQSHVVYGHAGNSAAEFPMRRLGANVWPLNTVQFSNHTQYGKWTGCVMPPSHLTEIVQGIAAIDKLHTCDAVLSGYLGSAEQGEHILGIVRQVKAANPQAKYFCDPVMGHPEKGCIVAPGVAEFHVRHGLPASDIIAPNLVELEILCEHAVNNVEEAVLAARELIAQGPQIVLVKHLARAGYSRDRFEMLLVTADEAWHISRPLVDFGMRQPVGVGDVTSGLLLVKLLQGATLQEVLEHVTAAVYEIMVTTKAMQEYELQVVAAQDRIAKPEHYFSATKL

SEQ ID NO: 4667 - DNA, 1656 bp, Citrobacter koseri
atgactaatcttccccactggtggcaaaacggcgttatctaccagatttatccaaagagttttcaggacaccacgggtagcggcaccggcgatttacgtggcgttatccaacgcctggactatctgcataaactgggcgttgatgccatctggctaacccccttttatgtctctccccaggtcgataacggttacgatgtagcgaactatacggcgattgatcccacctacggcacgctggacgattttgacgaactggtgacgcaggcaaaatcgcgcgggattcgtatcattctcgatatggtgtttaaccatacctctacccaacatgcctggtttcgcgaggcgctgaacaaagaaagcccttaccgccagttttatatctggcgcgatggcgaaccagaaacgccaccgaacaactggcgttcaaaatttggcggtagtgcgtggcgctggcatgcggaaagcgaacagtactatttgcatctctttgcaccagaacaggcggatctcaactgggagaatccagcggtacgcgcagagctgaaaaaagtctgtgaattctgggccgatcgtggggtcgacgggttgcgcctggatgtggtgaatctgatctccaaagacccgcgtttccctgaagacctggatggcgacgggcgtcgcttctacaccgacgggccacgagcacacgagtttttgcacgagatgaaccgcgatgtgtttacgccacgcgggttaatgaccgtaggtgaaatgtcctccaccagccttgagcattgccagcgatacgcggcactgacaggcagtgaattgtcgatgacctttaattttcatcacctgaaggtcgattatcccggtggtgaaaaatggacgctggctaaacctgactttgtggcgttgaaaacattgttccgccactggcaacaaggaatgcacaacgtggcatggaatgccttgttctggtgtaaccacgatcagccgcgcattgtttctcgctttggtgatgaaggtgaataccgcgtgcctgcggcaaaaatgctggcgatggtgctgcatggcatgcagggaacgccgtatatctaccagggcgaagagattggcatgaccaacccgcatttcacgcgcattactgactatcgcgacgtggagagcctcaatatgtttgccgagctgcgcaacgatggtcgtgatgccgacgagttattggcaatcctcgccagtaaatcccgtgacaacagccgcacgcccatgcaatggagcaacggcgataatgccgggtttacggctggcgaaccgtggattggcctgggcgataactatcaacaaatcaacgtagaagccgcgctggccgatgactcctcggtgttttacacctaccaaaagttaatcgcactgcgtaagcaagaagccatcctgacatggggcaattaccaggatctgctgccaaacagccctgtattgtggtgctatcgccgtgaatggaaggggcaaaccttgctggtcattgccaaccttagccgtgagatccaaccctggcagccagggcaaatgcgcggcaactggcagcttgtgatgcataactacgaagaagcctcaccacaaccctgtgccatgaatttacggccttttgaggctgtctggtggttacagaagtaa

SEQ ID NO: 4668 - protein, 551 aa, Citrobacter koseri
MTNLPHWWQNGVIYQIYPKSFQDTTGSGTGDLRGVIQRLDYLHKLGVDAIWLTPFYVSPQVDNGYDVANYTAIDPTYGTLDDFDELVTQAKSRGIRIILDMVFNHTSTQHAWFREALNKESPYRQFYIWRDGEPETPPNNWRSKFGGSAWRWHAESEQYYLHLFAPEQADLNWENPAVRAELKKVCEFWADRGVDGLRLDVVNLISKDPRFPEDLDGDGRRFYTDGPRAHEFLHEMNRDVFTPRGLMTVGEMSSTSLEHCQRYAALTGSELSMTFNFHHLKVDYPGGEKWTLAKPDFVALKTLFRHWQQGMHNVAWNALFWCNHDQPRIVSRFGDEGEYRVPAAKMLAMVLHGMQGTPYIYQGEEIGMTNPHFTRITDYRDVESLNMFAELRNDGRDADELLAILASKSRDNSRTPMQWSNGDNAGFTAGEPWIGLGDNYQQINVEAALADDSSVFYTYQKLIALRKQEAILTWGNYQDLLPNSPVLWCYRREWKGQTLLVIANLSREIQPWQPGQMRGNWQLVMHNYEEASPQPCAMNLRPFEAVWWLQK

SEQ ID NO: 4669 - DNA, 168 bp, Shigella sonnei
atggtcggtcaggagcaactggagtcgtcaccattatgccagcatagtgacaatgaaacagaaacgaaacgggaatgttccgtcgttattccagacgactggcaactaacatcgcagcagcaagcctttatagaactgtttgctgaagatgatcagccgaaacaataa

SEQ ID NO: 4670 - protein, 55 aa, Shigella sonnei
MVGQEQLESSPLCQHSDNETETKRECSVVIPDDWQLTSQQQAFIELFAEDDQPKQ

SEQ ID NO: 4671 - DNA, 1539 bp, Escherichia coli
atggcttttgcctcattaattgaacgccagcgcattcgcctgctgctggcgttattattcggtgcctgcggaacgctggccttctctccttacgacgtctggcctgcggcgattatttcgttgatggggcttcaggcgttgacctttaaccgccgtccactccagtctgccgctattggcttttgctggggatttggcctctttggcagcggtattaactgggtctatgtcagcatcgcgacctttggcggaatgcctggcccggttaacatcttcctggtggtgctgctggcggcgtatttgtcgctgtataccggactgtttgctggcgtgctgtcgcgtctgtggccgaaaaccacctggctgcgcgtggcgattgccgcccctgctctctggcaagtgaccgagtttctgcgcggttgggtactgacaggcttcccgtggttacagttcggctatagccagattgatggcccgttaaaagggctggcaccgataatgggcgtggaagccattaacttcctgctgatgatggttagtggcctgctggcactggcgttggtcaaacgcaactggcgtccgctggtggtggccgtcgtgctgtttgccctacccttcccgctgcgttacatccaatggtttaccccgcaaccggagaaaaccattcaggtttcgatggttcagggcgatattccgcaatcactgaaatgggatggagatcagcttcttaatacgctgaagatttactacaacgcaacggctccgctgatgggcaaatcatcgttgattatctggccggagtcggcgataaccgatctggaaattaatcagcaaccgttcctcaaagcactggacggtgagttgcgcgataaaggtagctcgctggtaaccgggattgtcgacgcgcgtctcaataagcagaaccgctacgatacctacaacaccatcatcacactgggtaaaggtgcaccatacagctacgaatcagccgatcgctataacaaaaaccatctagtgccgtttggcgagtttgtcccgctggagtcgattctgcgtccgttagcaccgttctttgatctgccgatgtcgtcgttcagccgtgggccatatatccagccgccgctgtcggtaaatggtattgagcttactgcggctatttgctacgagatcattctcggcgagcaagtgcgcgataacttccgcccggataccgactatctgctgactatctccaacgatgcgtggtttggtaagtctattggtccatggcagcacttccagatggcgcgaatgcgtgcgctggagctggcgcgcccactgttgcgcagcaccaacaacggcattacggcggtgattggcccgcagggggaggttcaggcgatgatcccgcagttcacccgcgaggtgttgaccactaatgtgacaccgaccaccggactcacaccgtatgcacgtaccggcaactggccactgtgggtgctgacggcgctgtttggttttgccgctgtgttgatgagtctgcgagcacgtaaacgttga

SEQ ID NO: 4672 - protein, 512 aa, Escherichia coli
MAFASLIERQRIRLLLALLFGACGTLAFSPYDVWPAAIISLMGLQALTFNRRPLQSAAIGFCWGFGLFGSGINWVYVSIATFGGMPGPVNIFLVVLLAAYLSLYTGLFAGVLSRLWPKTTWLRVAIAAPALWQVTEFLRGWVLTGFPWLQFGYSQIDGPLKGLAPIMGVEAINFLLMMVSGLLALALVKRNWRPLVVAVVLFALPFPLRYIQWFTPQPEKTIQVSMVQGDIPQSLKWDGDQLLNTLKIYYNATAPLMGKSSLIIWPESAITDLEINQQPFLKALDGELRDKGSSLVTGIVDARLNKQNRYDTYNTIITLGKGAPYSYESADRYNKNHLVPFGEFVPLESILRPLAPFFDLPMSSFSRGPYIQPPLSVNGIELTAAICYEIILGEQVRDNFRPDTDYLLTISNDAWFGKSIGPWQHFQMARMRALELARPLLRSTNNGITAVIGPQGEVQAMIPQFTREVLTTNVTPTTGLTPYARTGNWPLWVLTALFGFAAVLMSLRARKR

SEQ ID NO: 4673 - DNA, 774 bp, Klebsiella oxytoca
atggatcgtataattgaaaaattagatcacggctggtgggtcgtcagccatgaacaaaaattatggttgccgaagggagaattgccatatggcgaagcggcaaatttcgatcttgtgggtcagcgcgcactacaaatcggcgaatggcagggggaacctgtttggttagtacaacagcagcggcgtcacgatatggggtcggtacgtcaggtcattgatctcgatgttgggctgtttcaactggccggacgaggcgtacaactggcggagttttaccgatcgcataaatactgtggttactgcgggcatgaaatgtatccgagcaaaaccgaatgggcgatgctgtgcagccattgccgtgagcgttactacccgcaaatcgccccctgcattattgttgccatccgtcgcgatgattcgatcctcctcgcccagcatacccgccatcgtaacggtgtccatacagtacttgccggattcgtcgaagtgggcgaaaccctcgagcaggcagtcgcgcgggaagtgatggaagagagcggaattaaagttaaaaacttgcgttacgtgacttctcagccgtggccgtttcctcagtctttaatgaccgcgtttatggcggaatatgacagcggcgacatcgtgatcgacccgaaagaattgctcgaggcgaactggtatcgctatgacgatttgccgttactcccgccgcccggcaccgtagcgcgccgtctgatagaagatactgtggcgatgtgtcgggcagagtatgagtga

SEQ ID NO: 4674 - protein, 257 aa, Klebsiella oxytoca
MDRIIEKLDHGWWVVSHEQKLWLPKGELPYGEAANFDLVGQRALQIGEWQGEPVWLVQQQRRHDMGSVRQVIDLDVGLFQLAGRGVQLAEFYRSHKYCGYCGHEMYPSKTEWAMLCSHCRERYYPQIAPCIIVAIRRDDSILLAQHTRHRNGVHTVLAGFVEVGETLEQAVAREVMEESGIKVKNLRYVTSQPWPFPQSLMTAFMAEYDSGDIVIDPKELLEANWYRYDDLPLLPPPGTVARRLIEDTVAMCRAEYE

SEQ ID NO: 4675 - DNA, 210 bp, Citrobacter koseri
atgtttaactcccgtttaacaaccatggagtatagggcagtagcccgcagtatggatcgtcaccgacgtcatttcagcatcaggccttttaacgcctgcctttctggcactctatgccgcacctttcgtttgcattttgtcgttacgcctgcattatttctggcgtcgaatagctattccttaagcaggagcttgtcatggaattcttaa

SEQ ID NO: 4676 - protein, 69 aa, Citrobacter koseri
MFNSRLTTMEYRAVARSMDRHRRHFSIRPFNACLSGTLCRTFRLHFVVTPALFLASNSYSLSRSLSWNS

SEQ ID NO: 4677 - DNA, 717 bp, Citrobacter koseri
atgatctacaaaagcattgcggagcggttaagaattcgacttaactccgcagatttcacgctaaacagccttcttccgggtgaaaaaaagctggcggaagagtttgcggtatcgcggatgaccatccgtaaagccattgacctgctggtagcgtgggggctggtggtccgccgccacggtagtggcacttacctggtgcgcaaagatgtactgcatcaaaccgccagtctgaccgggctggtggaggtgttaaaacggcagggaaaaactgtcaccagccaggtgctgatttttgaaatcatgcctgcgcctccggccattgccagccagttacggattcaaatcaacgagcagatctacttctcccgtcgcgttcgttttgtggaagggaaaccgctgatgctggaagacagctatatgccggtaaaactgttccgtaatctttcgctgcaacatctggaagggtcgaagtttgaatatattgaacaagagtgcgggattttgattggcggtaattatgaaagcctgacgccggtgctcgccgatagactgctggcgcggcaaatgaaggtagcggaacacacgccactgctgcggatcacctcgttgtcatatagcgagagcggggagtttttgaattattcagtgatgttcagaaatgccagcgaataccaggtggagtaccatttacggcgactccacccggaaaagagttaa

SEQ ID NO: 4678 - protein, 238 aa, Citrobacter koseri [sequence omitted]

SEQ ID NO: 4679 - DNA, 1587 bp, Escherichia coli
atgagtcatcgtgcacgacaccaattactggcgttgccgggcattatctttttagttctctttcccatcattctttcgctatggattgccttcctttgggcaaaatcagaagtgaataatcagctccgaacctttgctcaactggcactggataaatccgagctggtcattcgccaggcagatttagtgagcgatgcagctgaacgctatcaggggcaagtttgcactccagcccatcaaaagcgaatgttgaatattattcgtggctatctttatattaatgaattgatctatgcccgtgataaccattttttatgctcatcgctgatagcgcctgtaaacggctatacgattgcaccggccgattataagcgtgaacctaacgtttctatctattattaccgcgatacgccttttttctctggctataaaatgacctatatgcagcggggaaattatgtggcggttatcaaccctctcttctggagtgaagtgatgtctgatgacccgacattgcaatggggtgtgtatgatacggtgacgaaaacctttttctcgttaagcaaagaggcctcggcagcaacgttttctccgctgattcatttgaaggatttaaccgtacaaagaaatggctatttatatgcgacagtttattcgacaaaacgcccaattgcagccattgttgcgacttcatatcaacgtcttataacccatttttataatcatcttatttttgcgttgcccgccggtattttggggagtcttgttctgctattactctggctacgtattcgacaaaactatttatctcccaaacgtaaattgcaacgcgccctcgaaaaacatcaactttgtctttattaccagccaataatcgatatcaaaacagaaaaatgtatcggcgctgaagcgttgttacgttggcttggtgagcaggggcaaataatgaatccggcagagtttattccgctggcagaaaaggaggggatgatagaacagataactgattatgttattgataatgtcttccgcgatctgggcgcgtacttggcaacacatgccgatcgctatgtttctattaacctgtcggcctccgattttcatacgtcacggttgatagcgcgaatcaatcagaaaacagagcaatacgcggtgcgtccgcagcaaattaaatttgaagtgactgagcatgcatttcttgatgtcgaaaaaatgacgccgattattctggctttccgccaggctggttacgaagtggcaattgatgattttggtattggctactctaacttgcataaccttaaatcattgaatgtcgatattttgaaaatcgataaatcgtttgttgaaacgctgaccacccacaaaaccagtcatttgattgcggaacacatcatcgagctggcgcacagcctggggttaaaaacgatcgctgaaggcgtcgaaactgaggagcaggttaactggctgcgcaaacgcggcgtgcgctattgccagggatggttttttgcgaaggcgatgccgccgcaggtgtttatgcaatggatggagcaattacccgcgcgggagttaacgcgcgggcaataa

SEQ ID NO: 4680 - protein, 528 aa, Escherichia coli
MSHRARHQLLALPGIIFLVLFPIILSLWIAFLWAKSEVNNQLRTFAQLALDKSELVIRQADLVSDAAERYQGQVCTPAHQKRMLNIIRGYLYINELIYARDNHFLCSSLIAPVNGYTIAPADYKREPNVSIYYYRDTPFFSGYKMTYMQRGNYVAVINPLFWSEVMSDDPTLQWGVYDTVTKTFFSLSKEASAATFSPLIHLKDLTVQRNGYLYATVYSTKRPIAAIVATSYQRLITHFYNHLIFALPAGILGSLVLLLLWLRIRQNYLSPKRKLQRALEKHQLCLYYQPIIDIKTEKCIGAEALLRWLGEQGQIMNPAEFIPLAEKEGMIEQITDYVIDNVFRDLGAYLATHADRYVSINLSASDFHTSRLIARINQKTEQYAVRPQQIKFEVTEHAFLDVEKMTPIILAFRQAGYEVAIDDFGIGYSNLHNLKSLNVDILKIDKSFVETLTTHKTSHLIAEHIIELAHSLGLKTIAEGVETEEQVNWLRKRGVRYCQGWFFAKAMPPQVFMQWMEQLPARELTRGQ

SEQ ID NO: 4681 - DNA, 324 bp, Citrobacter freundii
atgtcccatcagaaaattattcaggatcttatcgcatggattgacgagcatattgaccagccgcttaacattgatgtagtcgcaaaaaaatcaggctattcaaagtggtacttgcaacgaatgttccgcacggtgacgcatcagacgcttggcgattacattcgccaacgtcgcctgttactggccgccgttgagttgcgcaccaccgagcgtccgatttttgatatcgcaatggacctgggttatatctcgcagcagaccttctcccgcgttttccgtcggcagtttgatcgcactcccagcgattatcgccaccgcctgtag

SEQ ID NO: 4682 - protein, 107 aa, Citrobacter freundii
MSHQKIIQDLIAWIDEHIDQPLNIDVVAKKSGYSKWYLQRMFRTVTHQTLGDYIRQRRLLLAAVELRTTERPIFDIAMDLGYISQQTFSRVFRRQFDRTPSDYRHRL

SEQ ID NO: 4683 - DNA, 552 bp, Citrobacter koseri
atgaaaaaacttatcgtttcaagtgtattggcattcataacattttctgcgcaggccgcagcatttcaggtcactagtaatgaaataaaaacaggagagcaacttacaacgtctcatgtattttctggagttgggtgtgaggggggtaatacatcgccctcattaacctggtctggtgctccagaaggcaccaaaagctttgccgtaactgtgtatgatccagatgcgcctacaggcagcggatggtggcactggactgttgctaatattccagcaacggtaacatatttgcccgctgatgcaggaagacgtgatggtacaaaacttccgactggtgctgtccaaggccgaaatgattttggctatgcgggatttggtggagcatgtcctcccaaaggagataaaccccatcattaccagtttaaaatatgggctctaaaaactgataagattcctgtggattctaattccagcggagcgttagttggttatatgcttaatgccaataaaattgcaaccgctgagataatacccgtttatgaggtaaagtag

SEQ ID NO: 4684 - protein, 183 aa, Citrobacter koseri
MKKLIVSSVLAFITFSAQAAAFQVTSNEIKTGEQLTTSHVFSGVGCEGGNTSPSLTWSGAPEGTKSFAVTVYDPDAPTGSGWWHWTVANIPATVTYLPADAGRRDGTKLPTGAVQGRNDFGYAGFGGACPPKGDKPHHYQFKIWALKTDKIPVDSNSSGALVGYMLNANKIATAEIIPVYEVK

SEQ ID NO: 4685 - DNA, 243 bp, Citrobacter koseri
atgaagaaaccgctccgccagcaaaaccgccagattattagctatgtcccacgcacggaacccgcgccgccagaacatgcgataaagatggattcgtttcgtgatgtctggatgctgcgtggcaaatatgttgcgtttgtactgatgggagagtcatttctgcgctcaccggcgtttactgtgcctgaatctgcccaacgttgggcaaatcagatccgccaggaaggggaagtgactgagtaa

SEQ ID NO: 4686 - protein, 80 aa, Citrobacter koseri
MKKPLRQQNRQIISYVPRTEPAPPEHAIKMDSFRDVWMLRGKYVAFVLMGESFLRSPAFTVPESAQRWANQIRQEGEVTE

SEQ ID NO: 4687 - DNA, 525 bp, Citrobacter koseri
atgaacaggaaggcgtttctggcctgcgtgctgatgtgcgtcatattaaccggctgcgaaacggcgaaaaaaatcagtgaggtgatcaaaaacccggatatccaggtcgggagcctgaaggagcaaccttcggaaataaccgtcaccctgctgaccgaaccggacaccaataccaatgcggaaggtgaatcagccgccgtggatgtgcaactggtgtacctgactgacgactcaaaattgctggcagccgactatgaccagatagccagcacgccgctaccggatgtgctgggtaaaaactatatcgaccaccaggatttcaacctgttgccggacaccatcaaaaccctgccgccggtaaagctggatgagaaaacgcagtttattggtgtcgtggcctatttctccgatgaccaggccactgaatggaaacaaatcgagacggtggaaggaatcggccaccattaccgcctgctggtgcatgtacgtcaaagcagcatcgaaatgaaaaaagaggatgaataa

SEQ ID NO: 4688 - protein, 174 aa, Citrobacter koseri
MNRKAFLACVLMCVILTGCETAKKISEVIKNPDIQVGSLKEQPSEITVTLLTEPDTNTNAEGESAAVDVQLVYLTDDSKLLAADYDQIASTPLPDVLGKNYIDHQDFNLLPDTIKTLPPVKLDEKTQFIGVVAYFSDDQATEWKQIETVEGIGHHYRLLVHVRQSSIEMKKEDE

SEQ ID NO: 4689 - DNA, 1332 bp, Citrobacter koseri
atggcaaccacccgcaacaaggtgatgtggcaggaagggatgctgatgcgtccacaccatttccagcagcagcagcgttacaacgactacctggataaccagcgtttccgggccatgaatgatttatcctggggatttaccgaactcaccctcaacaatgaactgctggcgcagggtaagatcatgattgacagcgcgtcaggcacactgcccgacggcaccgtcttttctatccccgaccaggacgcactgcccgatccgctgcacccgcaaaattttccggacgaaagaagccgcaatatctacctcgctctgccggtcgccagtgatgtgagaaatgaaatcagcgacggacggcgaatcgggcgttaccggctgaattatgccgatgtccgggatttgcattcagaagaaggtgacgcgcgaacattgacgctgggtcaactgacgccgcgcattatgagcggtgcagaagatatgagcgcctatattacgctcccgctttgccgtatcagcgatcgccatgccgatggctccctgacgttggatgacgattttatcccctcctgccagaatattcaggtcagtaagaaactgcgtgtttatctcaaagaggtacagggggccattggcggacgggcaagcgatctggcaaaccgtattggctctccggcgcagagcggcatcgcggatgtggcggaatttatgatgttgcagttacttaaccgtaaccagacccggtttacccatcacgcccgtcgatcccagctccacccggaagatttctaccttgatcttgccgggttgctgggtgaactgatgacctttaccgagccgtcgcgcctgccctgcccgcttgatgtgtatgatcatcatgacctgaccaaaatatttaaaacgctgttaccggaagtcaaacgggcgctgcataccgtactgtcgccaagagccgtcaatctgccgctgcatctgcgtgacggtatctggcaggccgatatccatgacacagaactgctgcaatctgccacctttgtgctggccgtggcggcaaacatgccggtcgatcagatccagcgccagtttatccagcagtcgaaaatttcctcgccggaaaaaatccgcaatatggtcagtgtgcagatccccggtattccattgcgtgcccttatggtggctccccgccagcttccttaccattccgggttcagctatttcgaactcgacaagagtggccaggcctggacagaaatggctgccgccggggccgttgcactgcatgtttccggcagtttcccggatctgaacatgcaactgtgggcgataagagggtaa

SEQ ID NO: 4690 - protein, 443 aa, Citrobacter koseri
MATTRNKVMWQEGMLMRPHHFQQQQRYNDYLDNQRFRAMNDLSWGFTELTLNNELLAQGKIMIDSASGTLPDGTVFSIPDQDALPDPLHPQNFPDERSRNIYLALPVASDVRNEISDGRRIGRYRLNYADVRDLHSEEGDARTLTLGQLTPRIMSGAEDMSAYITLPLCRISDRHADGSLTLDDDFIPSCQNIQVSKKLRVYLKEVQGAIGGRASDLANRIGSPAQSGIADVAEFMMLQLLNRNQTRFTHHARRSQLHPEDFYLDLAGLLGELMTFTEPSRLPCPLDVYDHHDLTKIFKTLLPEVKRALHTVLSPRAVNLPLHLRDGIWQADIHDTELLQSATFVLAVAANMPVDQIQRQFIQQSKISSPEKIRNMVSVQIPGIPLRALMVAPRQLPYHSGFSYFELDKSGQAWTEMAAAGAVALHVSGSFPDLNMQLWAIRG

SEQ ID NO: 4691 - DNA, 762 bp, Citrobacter koseri
atggatgaggggtcactgtctctgccaccatttaccggacacgacgaaaaaagccagcgcaactaccatctcgcgcttcgtggcaacagcctgaatccgatgatcgacgcggccacgccgctactcggtatggtaatgcgcctttcaaccatgaacagccagacgatgccggagcatctttttgctcaggtggtgacagatgttcaggccgtggagcaactgcttcaggagcagggctacgaaccgggcgtgattatctcgtttcgctacatcctctgcacgtttattgatgaagcggcgctcggtaacggctggtcaaacaagaacgagtggatcaagcagtcattgctggtccatttccacaacgaagcctggggtggcgagaaagttttcatcctgctggagcgcctgatccgtgaacccaaacgttaccaggatctgctggaatttctctggatctgtttttctctgggatttcgcgggcgctacaaagtggcagcacaggatcagggggaatttgagcagatctaccgccgtctgtaccacgttctgcataaactgcgcggcgatgcccctttcccgctgttacaccaggacaaaaaaacccagggcgggcgttatcagctcatcagtcgcctgactgttaaacatattttttgtggtggcgttgtcgtgctggcgttgttttacctgttctatctgttgcggctggacagccagacgcaggacatcctgcaccagctaaacaaattacttcgataa

SEQ ID NO: 4692 - protein, 253 aa, Citrobacter koseri
MDEGSLSLPPFTGHDEKSQRNYHLALRGNSLNPMIDAATPLLGMVMRLSTMNSQTMPEHLFAQVVTDVQAVEQLLQEQGYEPGVIISFRYILCTFIDEAALGNGWSNKNEWIKQSLLVHFHNEAWGGEKVFILLERLIREPKRYQDLLEFLWICFSLGFRGRYKVAAQDQGEFEQIYRRLYHVLHKLRGDAPFPLLHQDKKTQGGRYQLISRLTVKHIFCGGVVVLALFYLFYLLRLDSQTQDILHQLNKLLR

SEQ ID NO: 4693 - DNA, 294 bp, Citrobacter koseri
ttgcatcaaggggaggtccacgccctgctcggcggcaatggtgccggtaaatcgacgttaatgaagattattgccggtattacccctgctgatagcggtacgctggagattgggggcaacaactacgtcagattaacgccagttcatgctcatcagctgggtatttatctcgttccccaggaaccgctgcttttcccaagcctgtcgataaaagaaaacatcctgtttgggctggcaaaaaaacagctctccatgcagaaaatgaagaacttgctggcggcgctgggctgctag

SEQ ID NO: 4694 - protein, 97 aa, Citrobacter koseri
MHQGEVHALLGGNGAGKSTLMKIIAGITPADSGTLEIGGNNYVRLTPVHAHQLGIYLVPQEPLLFPSLSIKENILFGLAKKQLSMQKMKNLLAALGC

SEQ ID NO: 4695 - DNA, 150 bp, Acinetobacter pittii
atgatagtgtccattaaaaggatggacactatttccctggaacctgaactcaccgcacaggcgttctacataaaacgcttacgcttcattgttgactcgaactcgacttcagataaatcacgctttacccttgatggagcctgtacatag

SEQ ID NO: 4696 - protein, 49 aa, Acinetobacter pittii
MIVSIKRMDTISLEPELTAQAFYIKRLRFIVDSNSTSDKSRFTLDGACT

SEQ ID NO: 4697 - DNA, 174 bp, Shigella sonnei
atgacgacacttatttatttgcaaattcctgtccctgaaccgattcctggcgatcctgttccagtgcccgatccgatccctcgcccgcaacccatgcctgacccaccacccgatgaagaaccgattaaattgtcgcatcgtgagcgtagatctgcgaggatacgcgcctgctaa

SEQ ID NO: 4698 - protein, 57 aa, Shigella sonnei
MTTLIYLQIPVPEPIPGDPVPVPDPIPRPQPMPDPPPDEEPIKLSHRERRSARIRAC

SEQ ID NO: 4699 - DNA, 903 bp, Acinetobacter pittii
atgatgaacagcaccaataaacttagtgttattattccgttatataatgcgggcgatgatttccgcacttgtatggaatctttaattacgcaaacctggactgctctggaaatcattattattaacgatggttcaacggataattctgttgaaatagcaaagcattacgcagaaaactatccgcacgttcgtttgttgcatcaggcgaatgctggcgcatcggtggcgcgtaatcgtgggattgaagtggcaacgggcaaatatgtcgcttttgtcgatgctgacgatgaagtctatcccaccatgtacgaaacgctgatgaccatggcgttagaggacgacctcgacgtggcgcagtgcaacgctgactggtgttttcgtgaaacgggagaaacctggaaatccatccccagcgatcgccttcgctcaaccggcgtattaaccggcccggactggctgcggatggggctttcttcgcgccgttggactcacgttgtctggatgggggtttatcgccgcgatgttattgttaaaaataacattaaatttattgccggattacatcatcaggatattgtctggacaacagaatttatgtttaatgcgctgcgtgcgcgatataccgagcaatcgttatataaatattatctgcataatacgtcagtgagtcggttgcatagacaagggaacaaaaaccttaattatcaacgtcactatattaagattactcgtctgctagagaaattaaatcgaaattatgccgacaaaattacgatttatccggaatttcatcagcaaataacttacgaagcattgcgtgtttgccatgcggtgcgcaaagagccggatattattacccgccaacggatgattgccgagatatttacttccggtatgtggtaa

SEQ ID NO: 4700 - protein, 300 aa, Acinetobacter pittii
MMNSTNKLSVIIPLYNAGDDFRTCMESLITQTWTALEIIIINDGSTDNSVEIAKHYAENYPHVRLLHQANAGASVARNRGIEVATGKYVAFVDADDEVYPTMYETLMTMALEDDLDVAQCNADWCFRETGETWKSIPSDRLRSTGVLTGPDWLRMGLSSRRWTHVVWMGVYRRDVIVKNNIKFIAGLHHQDIVWTTEFMFNALRARYTEQSLYKYYLHNTSVSRLHRQGNKNLNYQRHYIKITRLLEKLNRNYADKITIYPEFHQQITYEALRVCHAVRKEPDIITRQRMIAEIFTSGMW

SEQ ID NO: 4701 - DNA, 417 bp, Shigella sonnei
gtggcgaaacgcagcggtgtggcggtatcggcgctgcatttctatgaaagtaaagggttgattaccagtatccgtaacagcggcaatcagcggcgatataaacgtgatgtgttgcgatatgttgcaattatcaaaattgctcagcgtattggcattccgctggcgaccattggtgaagcgtttggcgtgttgcccgaagggcatacgttaagtgcgaaagagtggaaacagctttcgtcccaatggcgagaagagttggatcggcgcattcataccttagtggcgctgcgtgacgaactggacggatgtattggttgtggctgcctttcgcgcagtgattgcccgttgcgtaacccgggcgaccgcttaggagaagaaggtaccggcgcacgcttgctggaagatgaacaaaactaa

SEQ ID NO: 4702 - protein, 138 aa, Shigella sonnei
MAKRSGVAVSALHFYESKGLITSIRNSGNQRRYKRDVLRYVAIIKIAQRIGIPLATIGEAFGVLPEGHTLSAKEWKQLSSQWREELDRRIHTLVALRDELDGCIGCGCLSRSDCPLRNPGDRLGEEGTGARLLEDEQN

SEQ ID NO: 4703 - DNA, 1350 bp, Citrobacter portucalensis
atgtctacgccatcagcgcgtaccggcggttcactcgacgcctggtttaaaatttcacaacgtggaagcactgtccgtcaggaagtggttgccgggttaacaacgtttctggcgatggtctactcggtcatcgtcgttccaggtatgttgggtaaagcaggcttcccgcctgcggcagttttcgttgcaacctgtctggttgccggactcggttctatcgtgatgggtctgtgggctaatctgccgttggcgattggttgcgccatctccctgacggcgtttaccgcattcagcctggtgctggggcaacatattagcgtacctgtcgcgctgggtgccgtgttcctgatgggtgtgctgtttacggtaatttctgccacgggtatccgtagctggattttgcgcaacttgccgcacggtgtggcgcacggcacggggatcggtatcggtctgttcctgctgctcattgccgctaatggtgtcggtctggtgattaaaaacccgcttgatggtctgcccgttgcgctgggtgatttcgcgaccttcccggtgattatgtcactggtaggtctggcggtgatcatcggcctggaaaaactgaaagtccctggtggcattctgctgaccattatcggtatctcaattgtcggtttgatcttcgatcctaacgtccatttctccggcgttttcgccatgccttcattgagcgatgaaaacggcaattcactgattggcagcctggacattatgggcgcgctgaatcctgtagtcctgccaagcgttctggcgctggtgatgacggcagtatttgatgccaccggaactatccgtgccgtcgccggccaggcgaacctgctggataaagatgggcagatcatcgacggtgggaaagcactgaccactgactccatgagcagcgttttctctggcctggtgggtgctgctccggcagcggtatacatcgagtctgcggcgggtacggcggcgggcggtaaaaccggtttgacggctatcaccgttggcgtgctgttcctgctgattctgttcctctctccgctctcttacctcgttccggggtatgcaacggctccggcgctgatgtacgttggcctgctgatgctgagcaacgtggcgaaaatcgactttgctgattttgttgatgcgatggcgggtctggttacggcggtattcatcgtgctgacctgtaacatcgtaacaggcatcatgatcggcttcgcgactctggtgattggtcgtctggtttccggcgaatggcgcaagttgaacatcggtacggtcgttatcgccgtggcgctggtgaccttctatgcgggtggctgggctatctaa

SEQ ID NO: 4704 - protein, 449 aa, Citrobacter portucalensis
MSTPSARTGGSLDAWFKISQRGSTVRQEVVAGLTTFLAMVYSVIVVPGMLGKAGFPPAAVFVATCLVAGLGSIVMGLWANLPLAIGCAISLTAFTAFSLVLGQHISVPVALGAVFLMGVLFTVISATGIRSWILRNLPHGVAHGTGIGIGLFLLLIAANGVGLVIKNPLDGLPVALGDFATFPVIMSLVGLAVIIGLEKLKVPGGILLTIIGISIVGLIFDPNVHFSGVFAMPSLSDENGNSLIGSLDIMGALNPVVLPSVLALVMTAVFDATGTIRAVAGQANLLDKDGQIIDGGKALTTDSMSSVFSGLVGAAPAAVYIESAAGTAAGGKTGLTAITVGVLFLLILFLSPLSYLVPGYATAPALMYVGLLMLSNVAKIDFADFVDAMAGLVTAVFIVLTCNIVTGIMIGFATLVIGRLVSGEWRKLNIGTVVIAVALVTFYAGGWAI

SEQ ID NO: 4705 - DNA, 1248 bp, Citrobacter koseri
atggcactgaatattccattcagaaatgcgtactatcgttttgcatccagttactcatttctcttttttatttcctggtcgctgtggtggtcgttatacgctatttggctgaaaggacatctagggttgacagggacggaattaggtacactttattcggtcaaccagtttaccagcattctatttatgatgttctacggcatcgttcaggataaactcggtctgaagaaaccgctcatctggtgtatgagtttcatcctggtcttgaccggaccgtttatgatttacgtttatgaaccgttactgcaaagcaatttttctgtaggtctaattctgggagcgctcttttttggcctggggtatctggcgggatgcggtttgcttgacagcttcaccgaaaaaatggcgcgaaattttcatttcgaatatggaacagcgcgcgcctggggatcttttggctatgctattggcgcgttctttgccggcatattttttagtatcagtccccatatcaacttctggttggtctcgctatttggcgctgtatttatgatgatcaacatgtgttttaaagataaggatcaccagtgcgtagcggcggatgcgggaggggtaaaaaaagaggattttatcgcagttttcaaggatcgaaacttctgggttttcgtcatatttattgtggggacgtggtctttctataacatttttgatcaacaactttttcctgtcttttatgcaggtttattcgaatcacacgatgtaggaacgcgcctgtatggttatctcaactcattccaggtggtactcgaagcgctatgcatggcgattattcctttctttgtgaatcgggtagggccaaaaaatgcattacttatcggtgttgtgattatggcgttgcgtatcctttcctgcgcgctgttcgttaacccctggattatttcattagtgaagctgttacatgccattgaggttccactttgtgtcatatccgtcttcaaatacagcgtggcaaattttgataagcgcctgtcgtcgacgatctttctgattggttttcaaattgccagttcgcttgggattgtgctgctttcaacgccgactgggatactctttgaccacgcaggctaccagacagttttcttcgcaatttcgggtattgtctgcctaatgttgctatttggcattttcttcctgagtaaaaaacgcgagcaaatagttatggaaacgcctgtaccttcagcaatatag

SEQ ID NO: 4706 - protein, 415 aa, Citrobacter koseri
MALNIPFRNAYYRFASSYSFLFFISWSLWWSLYAIWLKGHLGLTGTELGTLYSVNQFTSILFMMFYGIVQDKLGLKKPLIWCMSFILVLTGPFMIYVYEPLLQSNFSVGLILGALFFGLGYLAGCGLLDSFTEKMARNFHFEYGTARAWGSFGYAIGAFFAGIFFSISPHINFWLVSLFGAVFMMINMCFKDKDHQCVAADAGGVKKEDFIAVFKDRNFWVFVIFIVGTWSFYNIFDQQLFPVFYAGLFESHDVGTRLYGYLNSFQVVLEALCMAIIPFFVNRVGPKNALLIGVVIMALRILSCALFVNPWIISLVKLLHAIEVPLCVISVFKYSVANFDKRLSSTIFLIGFQIASSLGIVLLSTPTGILFDHAGYQTVFFAISGIVCLMLLFGIFFLSKKREQIVMETPVPSAI

SEQ ID NO: 4707 - DNA, 201 bp, Acinetobacter pittii
atgcaacacgaactacaacctgattcactggttgatttgaaattcatcatggctgatactggcttcggtaagaccttcatctatgaccggattaagtccggcgacctgcctaaagccaaagttatccacggacgagcaagatggttatatcgtgaccattgtgaattcaaaaataagctcttaagccgcgccaatgggtaa

SEQ ID NO: 4708 - protein, 66 aa, Acinetobacter pittii
MQHELQPDSLVDLKFIMADTGFGKTFIYDRIKSGDLPKAKVIHGRARWLYRDHCEFKNKLLSRANG

SEQ ID NO: 4709 - DNA, 336 bp, Citrobacter koseri
atgaagtggattgtgattgatacagttatccagccatcatgcggaatatctttttcagtcatatggagtaaaataaaattaataatctggtatcaatcggatgctttcttacctcctgaaagtatatttacactgactcacacaggcatcatgctcaataacaaagtgctacctgtaaccatttacaacgtagtaccattcaataaaacattctggaattcaatcaaaaatagccaggaatgccctacaaatacagataacgtattgaatgaatgctttaataaccgttgcactctgcaaatatgtccttatggactaaaacaacaaagtccataa

SEQ ID NO: 4710 - protein, 111 aa, Citrobacter koseri
MKWIVIDTVIQPSCGISFSVIWSKIKLIIWYQSDAFLPPESIFTLTHTGIMLNNKVLPVTIYNVVPFNKTFWNSIKNSQECPTNTDNVLNECFNNRCTLQICPYGLKQQSP

SEQ ID NO: 4711 - DNA, 720 bp, Citrobacter rodentium
gtgaattcactctataccgctgaaggtgtaatggataaacactcgctgtggcagcgttatgtcccgctggtgcgtcacgaagcattgcgcctgcaggttcgactgcccgcgagcgtggaacttgacgatctgctacaggcgggcggcattgggttacttaatgccgtcgaacgctatgacgccctacaaggaacggcatttacaacttacgcagtgcagcgtatccgtggcgctatgctggatgaacttcgcagccgtgactgggtgccgcgcagcgtgcgacgcaacgcgcgtgaagtggcacaggcaatagggcaactggagcaggaacttggccgcaacgccacggaaactgaggtagcggaacgtttagggatcgatattgccgattatcgccaaatgttgctcgacaccaataacagccagctcttctcctacgatgagtggcgcgaagagcacggcgatagcatcgaactggttactgatgatcatcagcgagaaaacccgctacaacaactgctggacagtaatctgcgccagcgggtgatggaagccatcgaaacgttgccggagcgcgaaaaactggtattaaccctctattaccaggaagagctgaatctcaaagagattggcgcggtgctggaggtcggggaatcgcgggtcagtcagttacacagccaggccattaaacggttacgcactaaactgggtaagttataa

SEQ ID NO: 4712 - protein, 239 aa, Citrobacter rodentium
MNSLYTAEGVMDKHSLWQRYVPLVRHEALRLQVRLPASVELDDLLQAGGIGLLNAVERYDALQGTAFTTYAVQRIRGAMLDELRSRDWVPRSVRRNAREVAQAIGQLEQELGRNATETEVAERLGIDIADYRQMLLDTNNSQLFSYDEWREEHGDSIELVTDDHQRENPLQQLLDSNLRQRVMEAIETLPEREKLVLTLYYQEELNLKEIGAVLEVGESRVSQLHSQAIKRLRTKLGKL

SEQ ID NO: 4713 - DNA, 570 bp, Shigella sonnei
atgaagaataaggctgataacaaaaaaaggaacttccttacccatagtgaaatcgagtcactccttaaagcagcaaataccgggcctcatgcagcacgtaattattgtctgactttgctttgttttattcatggtttccgggcgagtgaaatttgtcgattgaggatttcggatattgatcttaaggcaaagtgtatatatatccatcgattaaaaaaaggcttttcaacaacgcacccgctattgaacaaagaagttcaggctttaaaaaactggttgagtatccgtacttcttatccgcatgctgagagcgagtgggtatttttatcacgtaaggggaatccgctttctcggcaacagttttaccatattatctcgacttccggtggtaatgccgggttgtcactggagattcatccgcacatgttacgccattcgtgtggttttgctttggcgaatatgggaatagatacgcgacttatccaggattatcttgggcatcgcaatattcgtcatactgtctggtataccaccagcaatgcagggcgtttttacggcatctgggggtaa

SEQ ID NO: 4714 - protein, 189 aa, Shigella sonnei
MKNKADNKKRNFLTHSEIESLLKAANTGPHAARNYCLTLLCFIHGFRASEICRLRISDIDLKAKCIYIHRLKKGFSTTHPLLNKEVQALKNWLSIRTSYPHAESEWVFLSRKGNPLSRQQFYHIISTSGGNAGLSLEIHPHMLRHSCGFALANMGIDTRLIQDYLGHRNIRHTVWYTTSNAGRFYGIWG

SEQ ID NO: 4715 - DNA, 849 bp, Shigella sonnei
atgaatcagactttacccactgctgacctgaatactgccggcacgacagacattattccgtctgtggctatcgaccgcatcatcgcgcagcgtaacgaaggtattgcactgttcatgcaggcgatggaatgcctggcgacagcgcgcaggattctactcgatgcttccggtgacatttttctctacgggtttgaagactgtgtgactgactccgttcgatgcatggataaaccggaagaagcaaaaaagaatatcactcgtcttgccgaccggaaaatctgggatcgcctgatgacggatactggcatgtacaccttcatgagttcatgccagcgtgatgagtggaacagccagctgatgagcgacacctgtcctgaaatcaccctggacaatgtactggcaacattccgccatcttaatgccagcaagatgcagacgtttgaacaggggctgattgatgtctaccggaaattgtcatgggattacagaaccaataatccctgccgcctgggtaagaaaatcattattgaaaatctgctgtaccgctggagtaatgggcgtgtgacgctggactgcagcggacgggaggcactggatgacctggtacgtccgttttatctgctggaggggcgcaacgttcctgacttcaggaacagcatcggggcgcagtatggtgaatttatcgggaacggcgacaatgtcggtaagctgttagaaggggaatattttacggtgcgtggctaccagaaagggaccgtacacattgtctttaagcgttctgaccttgttgaaaaactgaatgatattattgcacggcattatccaggtgcattgccgccacgagtctga

SEQ ID NO: 4716 - protein, 282 aa, Shigella sonnei
MNQTLPTADLNTAGTTDIIPSVAIDRIIAQRNEGIALFMQAMECLATARRILLDASGDIFLYGFEDCVTDSVRCMDKPEEAKKNITRLADRKIWDRLMTDTGMYTFMSSCQRDEWNSQLMSDTCPEITLDNVLATFRHLNASKMQTFEQGLIDVYRKLSWDYRTNNPCRLGKKIIIENLLYRWSNGRVTLDCSGREALDDLVRPFYLLEGRNVPDFRNSIGAQYGEFIGNGDNVGKLLEGEYFTVRGYQKGTVHIVFKRSDLVEKLNDIIARHYPGALPPRV

SEQ ID NO: 4717 - DNA, 435 bp, Shigella sonnei
atgacagtcagcagcacgatttccgttttttgccgcgacggggtgttccgtaccgtttactgccacctgcacggtgagccgacctggaacggtcgcatcctgcatacccactatgccaccggtcagcaggccgaagccctggttgaacacggtgatatccgttgcctcggtccccgttgcgacaaacccgccgggcatacgcttcagaacccggtggacggtgtgacggcttattacggacgtgacagtggtttccggatggacagtgaggcgcgtgagtaccgttctttcagggaggctattgccactgaaagcactgaagaggtgcgcttccattatgtgttcatcgacggctactggaaggtgatgtaccgcacgccggaaggctggaagatgaaagcgctcgcgctggcactgcgtcgctgtccggaatga

SEQ ID NO: 4718 - protein, 144 aa, Shigella sonnei
MTVSSTISVFCRDGVFRTVYCHLHGEPTWNGRILHTHYATGQQAEALVEHGDIRCLGPRCDKPAGHTLQNPVDGVTAYYGRDSGFRMDSEAREYRSFREAIATESTEEVRFHYVFIDGYWKVMYRTPEGWKMKALALALRRCPE

SEQ ID NO: 4719 - DNA, 1959 bp, Shigella sonnei
atgcctgtaacgaagtgtgaaccagaaaccacccgcaaagcaagccgtaaatctgtaaaaacgcaggaaactgtcctgtctgccctgctggcgcagacggaggaagtgagcgtgccgctggcctcgctgattaaatcaccgctgaatgtgcgcacggtgccgtattctgcggagtccgtcagcgaactggcggagtccattaagggcgtcggactgctgcagaatctggtcgtgcataccctgcctggtgaccgttacggtgtcgccgcaggtggtcgccgactggctgcactcaacatgctggcagagcgtggcatcattccggctgactggcctgtacgcgtgaaggttattccgcaggagctggcgactgccgcatcaatgactgaaaacggtcatcgtcgggatatgcaccctgccgaacagattgccggattccgtgcgatggcgcaggaaggcaaaacgcctgcacaaatcggtgatttgctgggctattcgccccgccacgttcagcgaatgctgaaactggcagaccttgcgcctgtcatcctcgatgcgctggcagaagaccgcatcaccacagagcactgtcaggcgctggcgctggagaacgacaccgcgcgtcaggtgcaggtgtttgaagccgcctgccagtcgggatggggcggtaaaccggaagtacagaccattcgtcgtctggtgaccgaaagtgaagtggcggtggcggggaacagtaaattccgcttcgtgggggctgatgccttctcgccagacgaactgcgcaccgatttgttcagcgacgacgagggtggctatgtggactgcgtggcgctcgatgccgccctgctggaaaaactccaggctgtcgcagagttccttcgggaagccgaaggctgggaatggtgcgccggacgcatggagcctgtcggtgagtgccgtgaggatgccggaacataccgctgtctgccggagccggaagcggtgctgacggaggcagaagaagaacgcctgaacgaactgatggcacgttacgacgcgctggaaaaccagtgtgaggaatccgacctgctggaagcagaaatgaagctgattgactgcatggcgaaggtcagggcgtggacgccggagatgcgtgccggaagtggcgtggtggtgtcctggcgttatggaaacgtatgtgtccagcgtggtgtgcagttgcgcagtgaagatgacgcgactgatgacgctgaccgcacggaacaggtgcaggagaaagcgtcagtggaggaaatcagtctgccgttgctgacgaaaatgtcttccgaacgcacgctggcagtccaggcagcactgatgcagcaaccggacaaatctctggcactgctggcatggacgctctgcctgaatgtgtttgacagcggagcgtacagtaaaccagcacaaatcagcctggaatgtaaacattattcgctgaccagcgatgcgccgtcagggaaggaaggtgccgcattcctggcgctgatggcagaaaaagcccgtcttgcggccctgttaccggagggatggtcacgggacatgacgacgttcctgtcactcagtcaggaggtgctgttatccctgctcagtttctgcaccgcatgcagccttaacggtgtccagacccgcgagtgtggtcgcacgtcacgcagtccgcttgactcactggagagcgccatcggttttcacatgcgcgactggtggcagccgacgaaagcaaacttcttcggacacctgaaaaagccgcagattatcgcagccctgaatgatgccggactgtccggtgccgcacgggacgcagagaagatgaagaaaggcgatgccgctgaacatgcagagttccatatgaaagacaaccgctgggtgcctggctggatgtgttcaccacgtccacagacggatgccactgaacgcgccgataacctggctgatgccgcctga

SEQ ID NO: 4720 - protein, 652 aa, Shigella sonnei
MPVTKCEPETTRKASRKSVKTQETVLSALLAQTEEVSVPLASLIKSPLNVRTVPYSAESVSELAESIKGVGLLQNLVVHTLPGDRYGVAAGGRRLAALNMLAERGIIPADWPVRVKVIPQELATAASMTENGHRRDMHPAEQIAGFRAMAQEGKTPAQIGDLLGYSPRHVQRMLKLADLAPVILDALAEDRITTEHCQALALENDTARQVQVFEAACQSGWGGKPEVQTIRRLVTESEVAVAGNSKFRFVGADAFSPDELRTDLFSDDEGGYVDCVALDAALLEKLQAVAEFLREAEGWEWCAGRMEPVGECREDAGTYRCLPEPEAVLTEAEEERLNELMARYDALENQCEESDLLEAEMKLIDCMAKVRAWTPEMRAGSGVVVSWRYGNVCVQRGVQLRSEDDATDDADRTEQVQEKASVEEISLPLLTKMSSERTLAVQAALMQQPDKSLALLAWTLCLNVFDSGAYSKPAQISLECKHYSLTSDAPSGKEGAAFLALMAEKARLAALLPEGWSRDMTTFLSLSQEVLLSLLSFCTACSLNGVQTRECGRTSRSPLDSLESAIGFHMRDWWQPTKANFFGHLKKPQIIAALNDAGLSGAARDAEKMKKGDAAEHAEFHMKDNRWVPGWMCSPRPQTDATERADNLADAA

SEQ ID NO: 4721 - DNA, 234 bp, Shigella sonnei
atgagcgaatatttcagaatacttcagggactgccggacggctcctttacccgcgaacaggcggaagccgttgccgcacagtaccggaacgtctttatcgaggatgatcagggaacgcattttcgcctggttgtccgcaataacaatggcctggtctggcgtacctggaattttgaggacggtgccgggtactggatgaaccatgtcatccggaatttcggcattcttaagtaa

SEQ ID NO: 4722 - protein, 77 aa, Shigella sonnei
MSEYFRILQGLPDGSFTREQAEAVAAQYRNVFIEDDQGTHFRLVVRNNNGLVWRTWNFEDGAGYWMNHVIRNFGILK

SEQ ID NO: 4723 - DNA, 423 bp, Shigella sonnei
atgtactgtactgttaaagaaatcatccgcgatgtactggatacagacgtgccggacagtgaatgcgtttttgccgtggtgctgacccgtggggatgtgcgctacatagctcaggactggaacctgtcagacgatgagctggaaaccgtcatgcagcggctggacgatgcctttgagcatggtgcggatgtcagcgttgttcacgacgttgttcgtgaactgatggaggaaaagcacgccagccgtcaggtgacagtcccggcggtgatgctggaaaaagtgatggcgctggcaggcagtgaaatgaagcgcctgtatgccgtcgggagtgagaacgggggcgacggtgatgcattcgtcagggaagaacgcgaagcaatggacgttgtgttacaggcgctggacggggagcacatgtcatga

SEQ ID NO: 4724 - protein, 140 aa, Shigella sonnei
MYCTVKEIIRDVLDTDVPDSECVFAVVLTRGDVRYIAQDWNLSDDELETVMQRLDDAFEHGADVSVVHDVVRELMEEKHASRQVTVPAVMLEKVMALAGSEMKRLYAVGSENGGDGDAFVREEREAMDVVLQALDGEHMS

SEQ ID NO: 4725 - DNA, 435 bp, Shigella sonnei
atgtacggaacatgcgaaacgctctgccgggagctggcagcgcagtatccgggagacgcgccgctgatgctggttgtctggtccccggaagagatccaggccctcgctgacggaatggatatttccctgtccgatcatgaaatcaggaccgtcctggcgcgcctggaggacatcccggaagaccagcgaattgagtccggtatttcttccgccgcggcgatggagattatcagcaacgtgagcgaaaaccgccaggtgaccgttccggctgaactgctggcgtccctgattcagaccgctgaacaggcattgtggaaacgtgaatgggccgcccgggatcatggcctcgccgtcccggaatgcgtcacccgccgtcaggcggtggttaatcaggcccgcaccctgctgaaaaacaacacacgcgaaaacgactga

SEQ ID NO: 4726 - protein, 144 aa, Shigella sonnei
MYGTCETLCRELAAQYPGDAPLMLVVWSPEEIQALADGMDISLSDHEIRTVLARLEDIPEDQRIESGISSAAAMEIISNVSENRQVTVPAELLASLIQTAEQALWKREWAARDHGLAVPECVTRRQAVVNQARTLLKNNTREND

SEQ ID NO: 4727 - DNA, 138 bp, Shigella boydii
atgtttgagttttatatggcagaacttcttcgccaccgctgggggcatctgcgcttatatcgtttccccggttctgttttgaccgattaccgaatactgaagaattacgccaaaaccctgacaggagcaggagtatga

SEQ ID NO: 4728 - protein, 45 aa, Shigella boydii
MFEFYMAELLRHRWGHLRLYRFPGSVLTDYRILKNYAKTLTGAGV

SEQ ID NO: 4729 - DNA, 453 bp, Shigella sonnei
atgagtaataatataaaatatggctccagaatacttgatatgggtgttctgctggagatgaaagcgcttgtgaatgcaaatggtggtgtgtcacggtgcattatggagtgtcggcagcttgcctgtgaggtccgtcattcgcaacaattactggataagctgtcatgtattgacgactggttgtgccggttttcctcaataatgtatcaccgttttgataaagaacagattcagtggcgggaggatgtggacagggattatcccagagaaaaagtttatattttcagtcccgataatgtctccgtccataataatgatattaaagactctgccaataacacatcaggaataaccgtgtcggttacagccagtaaaatatgcgcaggtcagaaagagtttgatgcttttttaaaactggcagaaaaattgagagaaaaccctacgggtaattaa

SEQ ID NO: 4730 - protein, 150 aa, Shigella sonnei
MSNNIKYGSRILDMGVLLEMKALVNANGGVSRCIMECRQLACEVRHSQQLLDKLSCIDDWLCRFSSIMYHRFDKEQIQWREDVDRDYPREKVYIFSPDNVSVHNNDIKDSANNTSGITVSVTASKICAGQKEFDAFLKLAEKLRENPTGN

SEQ ID NO: 4731 - DNA, 462 bp, Shigella sonnei
atgtataaacaggcaacagaattaatgctgaactttaaagaccgcattctgattaagggggaagaagataccggcaagtcaactctcctgactgaaataagaatcagtgatagtgattcccggtattacaactttaaaactcttaactctgcggggtacaaccggctttgtgatgaaaatattgataattttgattttctgaatacacctgaaaagacgttaatccttgatggagtcaggctgtgtgaaaagaaaatgacatcaaaagttatcaggttaattaaacaggccagaaaatatcataaacgcctggttgtggttgcagactcatgtgagtctgagtttatcgaactgttgtttgatggtgttattgcattgtccttcaattctgacagagaaaggagttgcaatgtttatacgccatcaaggcatcgtaatacagataatatttatgctaggtaa

SEQ ID NO: 4732 - protein, 153 aa, Shigella sonnei
MYKQATELMLNFKDRILIKGEEDTGKSTLLTEIRISDSDSRYYNFKTLNSAGYNRLCDENIDNFDFLNTPEKTLILDGVRLCEKKMTSKVIRLIKQARKYHKRLVVVADSCESEFIELLFDGVIALSFNSDRERSCNVYTPSRHRNTDNIYAR

SEQ ID NO: 4733 - DNA, 294 bp, Shigella sonnei
atgcttactgaagctaaaaaaatggcagtagagatgatattctggcctgcttgtcctgtagatgatgattattgtttcgacgctataatgtatacatcagttattgacaagaagtttgaagatgaacatggggtatatcttcatcaggtttacaaagaactatgctcaacacctgaattaaaaaaacttctaaaaaagaaagcaataaaattgattgcttttaagtacgatattgatcttgattcagctaacaagattttaatgaaaaatatgctaaggaggattgaaaactga

SEQ ID NO: 4734 - protein, 97 aa, Shigella sonnei
MLTEAKKMAVEMIFWPACPVDDDYCFDAIMYTSVIDKKFEDEHGVYLHQVYKELCSTPELKKLLKKKAIKLIAFKYDIDLDSANKILMKNMLRRIEN

SEQ ID NO: 4735 - DNA, 375 bp, Shigella sonnei
atgaaaagtgtttatgttgttggcaaaggtttaatcgttgccggtaataaaattacaatcgatggaaaagagcatgtctcggtagaaaatagtgaaaacattgttatcactgatgattgtattaaaattggtaataaaacagtggtttttaaaggcaggagtattaagatagaaatacatggaaatgtaaataaaatagtaaccgaaaatgctgatgtcagtattcatgggaatgctggggatgttgaaaccgtgagtggtgatgttgattgtcgtcaggttaatggcgatataaccactgtaagtggtgatgttacttgtggcgatgtttctggtgacgtaaccactgtcagcggagatataaacaaaaaatga

SEQ ID NO: 4736 - protein, 124 aa, Shigella sonnei
MKSVYVVGKGLIVAGNKITIDGKEHVSVENSENIVITDDCIKIGNKTVVFKGRSIKIEIHGNVNKIVTENADVSIHGNAGDVETVSGDVDCRQVNGDITTVSGDVTCGDVSGDVTTVSGDINKK

SEQ ID NO: 4737 - DNA, 288 bp, Shigella sonnei
atgaaattcacttcaaccacgaatcatgttttcacattcgaacgagtaacgctttgcacgattgttcttattcataaggatacgggacaacagtatgttgtcatatttacggataacaataacattcgtgactataaaaccggaattgttcctcagtttggcaaacttaagcagagtgatattgatttagtccttttctacagggacgaatatgaaaaatattttgattcattaaaagatggcgatgaatgcttgagttttaaagattttattgagtgtctttgttaa

SEQ ID NO: 4738 - protein, 95 aa, Shigella sonnei
MKFTSTTNHVFTFERVTLCTIVLIHKDTGQQYVVIFTDNNNIRDYKTGIVPQFGKLKQSDIDLVLFYRDEYEKYFDSLKDGDECLSFKDFIECLC

SEQ ID NO: 4739 - DNA, 513 bp, Shigella sonnei
atgaacataagtgtggaagatttgtttccggagtcatttcaacgaattaaagaagaagaagaagcgaacaggcctgatcctaactggtttgcacatttaccgcctgaaaaaatcaatgcgtatatgtccaagtatcctttcaaatcctttgatgatattcctctggacaacagtgggttgcaatacccttcactacaggaactggagttttattttcccccggcggccctggctgctaattgccatcaacttcctgagagaatgagacaaaagcctgtggtcacgatgattaatgggttaaccctgttaaggtcgcttggcgttcaggctttcaatatcgacccacgccgatggcacaaaattaaaacctatttaagtaaaggaacgattgaatatccacaaatgtccgaagacggaaaagtaattatagatggcaggcatagaatactacttattatgcagatttataaagtaactgatgttcccgttttttttctgaaaggaataagctga

SEQ ID NO: 4740 - protein, 170 aa, Shigella sonnei
MNISVEDLFPESFQRIKEEEEANRPDPNWFAHLPPEKINAYMSKYPFKSFDDIPLDNSGLQYPSLQELEFYFPPAALAANCHQLPERMRQKPVVTMINGLTLLRSLGVQAFNIDPRRWHKIKTYLSKGTIEYPQMSEDGKVIIDGRHRILLIMQIYKVTDVPVFFLKGIS

SEQ ID NO: 4741 - DNA, 528 bp, Shigella sonnei
atgaccagcaataaagataagaacaagaaagcaaacgaaatattatatgcattttccataatcgggattattccattaatggctatattaatacttcgaataaataatccatattctcaagtgctgtactacttatataataaggtggcatttctcccttctattacatcattgtatgatcccgtcatgacaacacttatgtcaaactacaacaagacagcaccagttatgggtattctcgtttttctttgcacatataagacaagagaaatcataaagccagtaacaagaaaacttgttgtgcaatcctgtttctgggggcccgttttttatgccattctgatttatatcacactgttctataatctggaactaacaacagcaggtggtttttttaaattattatctcataatgtcatcactctgtttattttatattgctccatttactttactgttttaaccatgacatatgcgattttactgatgccattgcttgtcattaaatattttaaagggaggcagtaa

SEQ ID NO: 4742 - protein, 175 aa, Shigella sonnei
MTSNKDKNKKANEILYAFSIIGIIPLMAILILRINNPYSQVLYYLYNKVAFLPSITSLYDPVMTTLMSNYNKTAPVMGILVFLCTYKTREIIKPVTRKLVVQSCFWGPVFYAILIYITLFYNLELTTAGGFFKLLSHNVITLFILYCSIYFTVLTMTYAILLMPLLVIKYFKGRQ

SEQ ID NO: 4743 - DNA, 816 bp, Shigella sonnei
atggaaaccttaactgttcatgcaccatcaccatcaactaacttaccaagttatggcaatggtgcattttctctttcagcaccgcatgttcctggtgctggccctcttttagtccaggttgtttatagttttttccagagtccaaacatgtgtcttcaggctttaactcaacttgaggattacatcaaaaaacatggggccagcaaccctctcacattgcagatcatatcgacaaatattggttacttctgtaacgccgaccgaaatctggttcttcaccctggaataagcgtttatgacgcttaccacttcgcaaaaccagcgccaagtcaatatgactatcgctcaatgaatatgaaacaaatgagcggtaatgtcactacaccaattgtggcgcttgctcactatttatggggtaatggcgctgaaaggagcgttaatatcgccaacattggtcttaaaatttcccctatgaaaattaatcagataaaagacattataaaatctggtgtagtaggtacattccctgtttctacaaagttcacacatgccactggtgattataatgttattaccggtgcatatcttggtaatatcacactgaaaacagaaggtactttaactatctctgccaatggctcctggacttacaatggcgttgttcgttcatatgatgataaatacgattttaacgccagcactcaccgtggcatcatcggagaatcgctcacaaggctcggggcgatgttttctggtaaagagtaccagatactgcttcctggtgaaattcacattaaagaaagtggtaagcgataa

SEQ ID NO: 4744 - protein, 271 aa, Shigella sonnei
METLTVHAPSPSTNLPSYGNGAFSLSAPHVPGAGPLLVQVVYSFFQSPNMCLQALTQLEDYIKKHGASNPLTLQIISTNIGYFCNADRNLVLHPGISVYDAYHFAKPAPSQYDYRSMNMKQMSGNVTTPIVALAHYLWGNGAERSVNIANIGLKISPMKINQIKDIIKSGVVGTFPVSTKFTHATGDYNVITGAYLGNITLKTEGTLTISANGSWTYNGVVRSYDDKYDFNASTHRGIIGESLTRLGAMFSGKEYQILLPGEIHIKESGKR

SEQ ID NO: 4745 - DNA, 354 bp, Shigella sonnei
atgaaagtaattagcatgaaatttatttttattttaacgattattgctcttgctgctgtttttttctggtctgaagataaaggtccggcatgctatcaggtcagcgatgaacaggccagaacgtttgtaaaaaatgattacctgcaaagaatgagacgctgggacaacgatgttcaacttcttggtacagaaatcccgaaaatcacatgggaaaagattgagagaagtttaacagatgttgaagatgaaaaaacacttcttgtcccatttaaagctgaaggcccggagggtaagagaatgtattatggtatgtaccattgtgaggagggatatgttgaatatgcgaatgactaa

SEQ ID NO: 4746 - protein, 117 aa, Shigella sonnei
MKVISMKFIFILTIIALAAVFFWSEDKGPACYQVSDEQARTFVKNDYLQRMRRWDNDVQLLGTEIPKITWEKIERSLTDVEDEKTLLVPFKAEGPEGKRMYYGMYHCEEGYVEYAND

SEQ ID NO: 4747 - DNA, 1362 bp, Citrobacter freundii
atgacattagcagccatcaccatgaccgccccggaagccgccagccctgtgcagatgtaccgcgcgacctactcaccggatgacaacaaactgcgcctgtatgccgcgtcacgcctcgacccggagacgtataaaaaagtgcatgatgccggttttcgctgggcacccaaacaggcgctgtttgtcgcgccagcctggacaccgggccgggaagacgtgctcctctcacttgccggagagattgaggatgaagacagcacgctcgctgaacgtcaggaagcacgggcggagcggtttaccggatacagcggaaagcgggccagtgaatccgcacaggcacttgatgaagtggaaagactggccgcgatgatcccgcccggtcagcccattcttgtggggcatcacagcgaacgccgcgcccgtcgtgatgcgcagcgtattgaaaacggcatgaaacgtgccgtgatgctctttgaacgtgcggaatactgggaagagcgggcgcggtcggcactgcttcacgcgaagtataaagaacgtccggacgttcgctggcgtcgtatcaaaaaaatcgaagctgatttgcgcaaggctgaaaagaccatcgcacagtcgcagaaatatctgacgatgtggcgggctgaatcgctggatctgaatatggcaaaactcatcagcagtcatgaccatatcagcgcctgtttcccgctggatacgtatccgcgcccggcagaaaaaagccagtatgaaggaagtcgatcgttatggtcggccctggatgatgacatcatcaccacggagcaggcccgcgaaattgcgatccgctgtcatgaacggcagatccagcgtcagcaacgctgggttaaccactatcagaaccgcctgatctatgagcgtaccatgctggacgaaagcggcggcgtggttacccggacacaggattttgagccgggcggacaggttttcagccggggcgagtggctgaccatcatccgtgtgaacaaaagcaacggggcggtgagttcagtcacaacgccaaattacagttttctcgggtacagcggcacgatgaaagtgacgcccgatcgcatcacggactacaaagcaccatcggcagaagaggctgccgtcgccagtcaggccgcgaagcgtccgccggtagtcaactatccgggggaaggtttccgggaaatgacaaaggcacagtgggccgccctgccccgggactgtaaggccgtgcgcagtgtggcagaagcagaagaccacggggcataccgctaccgccgcacaatggacaataatttccgcctggtgaatgtgtatatcaccgacatgaaaatcacggaaattccacagaaataa

SEQ ID NO: 4748 - protein, 453 aa, Citrobacter freundii
MTLAAITMTAPEAASPVQMYRATYSPDDNKLRLYAASRLDPETYKKVHDAGFRWAPKQALFVAPAWTPGREDVLLSLAGEIEDEDSTLAERQEARAERFTGYSGKRASESAQALDEVERLAAMIPPGQPILVGHHSERRARRDAQRIENGMKRAVMLFERAEYWEERARSALLHAKYKERPDVRWRRIKKIEADLRKAEKTIAQSQKYLTMWRAESLDLNMAKLISSHDHISACFPLDTYPRPAEKSQYEGSRSLWSALDDDIITTEQAREIAIRCHERQIQRQQRWVNHYQNRLIYERTMLDESGGVVTRTQDFEPGGQVFSRGEWLTIIRVNKSNGAVSSVTTPNYSFLGYSGTMKVTPDRITDYKAPSAEEAAVASQAAKRPPVVNYPGEGFREMTKAQWAALPRDCKAVRSVAEAEDHGAYRYRRTMDNNFRLVNVYITDMKITEIPQK

SEQ ID NO: 4749 - DNA, 564 bp, Shigella sonnei
atgcacagtcagttaagagaacgtatccggctgatgcgcgcaaggctggataacgccgcgccggttgctgaaatccgggctgaatctcagctttttgtgactcctgccccggtctgtgatcgcctggtgatgctggcggagatcagcaaccgtgatcacattctggaaccctctgccggcaccggggccatactgagggcgattcgggataccgcgccgggggccatgtgtgatgcggtggaaatcaacagcgggctggtccggtatctgcgggaaaattttaacggtgtcagggttcagtgtggcgacttcatggaatggcagccggcgcagtattacagccgggttatcatgaatccgccgttcagccacgggcaggatatccggcatatcctgcgggccttttccctgttgcgtccgggtggcgtgctggtcgccgtctgtctcaacggaccacgccagcaggagaagctgttaccgttttctgacgtccgcgaggagctgccgcgcggcacgtttgcttataccgatgtcccgacgatgattattcgtctgcgtgcctga

SEQ ID NO: 4750 - protein, 187 aa, Shigella sonnei
MHSQLRERIRLMRARLDNAAPVAEIRAESQLFVTPAPVCDRLVMLAEISNRDHILEPSAGTGAILRAIRDTAPGAMCDAVEINSGLVRYLRENFNGVRVQCGDFMEWQPAQYYSRVIMNPPFSHGQDIRHILRAFSLLRPGGVLVAVCLNGPRQQEKLLPFSDVREELPRGTFAYTDVPTMIIRLRA

SEQ ID NO: 4751 - DNA, 720 bp, Shigella sonnei
atgagcgcacgttcacaggcactggttcctctcagcacagagcaacaggccgcatggcgggcggtggcggagaccgaaaaacgccgccatcagggtaacacgctggctgaatatccgtatgcgggtgcgtttttccgctgtctgaacggaagccgcaggatatcgctgtctgacctgcgatttttcatgccgtccctgaccgcagaagaactgcacggcaaccgtcttcagtggctgtatgccatcgatgtgctgattgaaacacagggcgaggtctgcctccttccccttcccggtgatgcagcagtgcgcttgttcccgtcggtgcggtttcgtgtcagggaacgcagtcgccataaatccgcgctggtcatgcagaagtacagccgccagcaggcgagggaggcagagcagaaagcccgtgcgtaccaggcgctggtcgctcaggctgaaatcgaactggcattccattcgccggaaacagtcggaagctggcatgcacgctggagtgaccgggtggcagagcatgacctggaaaccctgttctggcagtggggcgagcgttttccgtcactggccggaatggaacgctggcagtggcaggatatgccgttctggcaggttattgcggaagccagtcttgcagcaagagaggccggtcacgctgtccgtgagatggagcggtggatggtgccgaacaaactccgggaggcagcgtga

SEQ ID NO: 4752 - protein, 239 aa, Shigella sonnei
MSARSQALVPLSTEQQAAWRAVAETEKRRHQGNTLAEYPYAGAFFRCLNGSRRISLSDLRFFMPSLTAEELHGNRLQWLYAIDVLIETQGEVCLLPLPGDAAVRLFPSVRFRVRERSRHKSALVMQKYSRQQAREAEQKARAYQALVAQAEIELAFHSPETVGSWHARWSDRVAEHDLETLFWQWGERFPSLAGMERWQWQDMPFWQVIAEASLAAREAGHAVREMERWMVPNKLREAA

SEQ ID NO: 4753 - DNA, 261 bp, Shigella sonnei
atggccaggtacgaagatgaaaataaaacgccagtgacgccagaacaaataattactccccgccgttgggaggataaacagaaagatctctggacaacctggcagcgggttcaggagaatatgataaaaggtggattatcggggcgaagtgcctccggtaaaaataccagaacaagagccattacaggcattgacggtgatatccgaatcaacaaagcattatggatgattgccgaacagttcagggagtggaagtcatga

SEQ ID NO: 4754 - protein, 86 aa, Shigella sonnei
MARYEDENKTPVTPEQIITPRRWEDKQKDLWTTWQRVQENMIKGGLSGRSASGKNTRTRAITGIDGDIRINKALWMIAEQFREWKS

SEQ ID NO: 4755 - DNA, 861 bp, Shigella sonnei
atgataagtttatcaccaccgactatttgcaacagtgcccccaaaaatgcccctcataaggttgtgttacctgattttactggtctggcaattcggcttgatgcacaaatcaggaaccagtttcatcaactgaaagaggatgagcacttccttcgatatcggcagttgtcggaaaggtggtatcaggcgggctctattagtgacagaaacaaccgcagtaagcgttttgagaagatcatggatgactcacttgattttttgctttacagccaagacgtcatgcctaacatcaatccagatgatctccaatggcatgattacgaaaaggctagcagtaagggtaaaatgtactgtgtagcgcttctgttccatgtcattgcacgggctgcatatgaacccgaatctgtgggtaaagatccgacacttccagaatattgccggtggatgaaaaattggatagagaaaacattaggtcatgattttttagatagaatgatgatctattgtgcgctgtttgccccagcgtattttcccgcgttacaacgtctgagcggagagaaagaaacgcgtgatgtccatgaattcctggctgagcatgttcgcactttagctcaaaaaaattcttcagaggtaaattatagagatcaacggcaattcacgtttggctacaccatgttcacgaagcaacaatttgaatttctggacatgatgcgcgatgtccattaccggattgattgtattgaacagctccttctggaccttatagaacgtaaggttgtggatttcactgatgcatctgttgcaggcacgtggattgagaagcaaattcagcggcttgaatcaaacgacgtaaagcagtaa

SEQ ID NO: 4756 - protein, 286 aa, Shigella sonnei
MISLSPPTICNSAPKNAPHKVVLPDFTGLAIRLDAQIRNQFHQLKEDEHFLRYRQLSERWYQAGSISDRNNRSKRFEKIMDDSLDFLLYSQDVMPNINPDDLQWHDYEKASSKGKMYCVALLFHVIARAAYEPESVGKDPTLPEYCRWMKNWIEKTLGHDFLDRMMIYCALFAPAYFPALQRLSGEKETRDVHEFLAEHVRTLAQKNSSEVNYRDQRQFTFGYTMFTKQQFEFLDMMRDVHYRIDCIEQLLLDLIERKVVDFTDASVAGTWIEKQIQRLESNDVKQ

SEQ ID NO: 4757 - DNA, 285 bp, Shigella sonnei
atggggtctgtgcagccgatggccgagaaagccgctgtaagcgcccagaacgagcgaagagccaaggagctaagggaaaccctagcccagcagcaaaaacgcttacaggcccttcaggagccgtttaaggggctatccaaggatcaggtagcgggactgatccggcaggcggtgaaattgcggcaggagaacgagcaggagaagcaggagcgcgcccagcagatcaaagagcgattcaaggccaagcgggaacgggagcgcagcgaccgcagcaggggccgttaa

SEQ ID NO: 4758 - protein, 94 aa, Shigella sonnei
MGSVQPMAEKAAVSAQNERRAKELRETLAQQQKRLQALQEPFKGLSKDQVAGLIRQAVKLRQENEQEKQERAQQIKERFKAKRERERSDRSRGR

SEQ ID NO: 4759 - DNA, 216 bp, Shigella sonnei
atgagcatgtattacatcaagacaggtctggagtactggaaacccaagggctacgggtacaccaagagccgcgaggaggcgggggttttcaccctcaaggacatggaagaattgaacctcgatggctgcaccctggaacgcgccgaagtggcgttcctggacgaggacggccccagtcccgacctaccccaccgcgtcaccctgccccgcgattga

SEQ ID NO: 4760 - protein, 71 aa, Shigella sonnei
MSMYYIKTGLEYWKPKGYGYTKSREEAGVFTLKDMEELNLDGCTLERAEVAFLDEDGPSPDLPHRVTLPRD

SEQ ID NO: 4761 - DNA, 516 bp, Shigella sonnei
atgaatatccaggaagcattaaacgtttttggattatccggcgaattaactgaaaaagatatcaaagcagcatacagaaaagccgctttaaaatatcatccagatcgtaacccgttaggggctgaactgatgaaagcggtaaatgcagcttttgatgtcttgatggcaaatattgataaaataaatcagttccagagcgctgatgaacatgcacgatataattacggtgatgacctggaaaaagtattaaacgttctttctggtttatctggtctggtatttgaagtgataggtaactgggtatggattagtggagaaactattacacataaggaaactttaaaagaaatcgggtgtaaatgggcggcaaagaaaaaacaatggttttatcgtccggacgaacataaaagttactggaatcgtgaagaacacacgatagaagaaatccgcgcaaaatacggtacaaccggacagcgcagggcgacagggtggcaacgcgtggaaaccagagcgtaa

SEQ ID NO: 4762 - protein, 171 aa, Shigella sonnei
MNIQEALNVFGLSGELTEKDIKAAYRKAALKYHPDRNPLGAELMKAVNAAFDVLMANIDKINQFQSADEHARYNYGDDLEKVLNVLSGLSGLVFEVIGNWVWISGETITHKETLKEIGCKWAAKKKQWFYRPDEHKSYWNREEHTIEEIRAKYGTTGQRRATGWQRVETRA

SEQ ID NO: 4763 - DNA, 255 bp, Shigella sonnei
atgagaaaaaacaaagggcgattgacttattatcttgaagtgattgataaaaaataccattttgtaaaaaaaataagcagttattcaaaggagttcactgacggaaaaacaaaaagaacaaagagaacgttaagtgagctggtttttaatgaaagtgaggtcgaggcaatagactttacaaaaaatggtttaagacctgttgataagaatattctcttaactatggtgaaagaatataaggagagtgatgcatga

SEQ ID NO: 4764 - protein, 84 aa, Shigella sonnei
MRKNKGRLTYYLEVIDKKYHFVKKISSYSKEFTDGKTKRTKRTLSELVFNESEVEAIDFTKNGLRPVDKNILLTMVKEYKESDA

SEQ ID NO: 4765 - DNA, 375 bp, Shigella sonnei
atgaaaacattatccgacacacatgtacgggaggtatctcgctgcccgtctcccgtcaccatctggcagacactgctcatccgactgctggaccagcattatggcctcacactgaatgacacaccgtttgtcgatgaacgtgtgattgagcagcatattgaggcaggcatttcactgtgtgatgcagttaattttctcgtggaaaaatacgcgctggtgcgtaccgaccagccgggattcagcacctgtccccgctctcagttaataaacagtattgatatcctccgggctcgccgggcgaccggcctgatgacccgcgacaattacagaacggtaaataacattaccctgggtaagtatccggaggcgaaatga

SEQ ID NO: 4766 - protein, 124 aa, Shigella sonnei
MKTLSDTHVREVSRCPSPVTIWQTLLIRLLDQHYGLTLNDTPFVDERVIEQHIEAGISLCDAVNFLVEKYALVRTDQPGFSTCPRSQLINSIDILRARRATGLMTRDNYRTVNNITLGKYPEAK

SEQ ID NO: 4767 - DNA, 1539 bp, Escherichia coli
atggcttttgcctcattaattgaacgccagcgcattcgcctgctgctggcgttattattcggtgcctgcggaacgctggccttctctccttacgacgtctggcctgcggcgattatttcgttgatggggcttcaggcgttgacctttaaccgccgtccactccagtctgccgctattggcttttgctggggatttggcctctttggcagcggtattaactgggtctatgtcagcatcgcgacctttggcggaatgcctggcccggttaacatcttcctggtggtgctgctggcggcgtatttgtcgctgtataccggactgtttgctggcgtgctgtcgcgtctgtggccgaaaaccacctggctgcgcgtggcgattgccgcccctgctctctggcaagtgaccgagtttctgcgcggttgggtactgacaggcttcccgtggttacagttcggctatagccagattgatggcccgttaaaagggctggcaccgataatgggcgtggaagccattaacttcctgctgatgatggttagtggcctgctggcactggcgttggtcaaacgcaactggcgtccgctggtggtggccgtcgtgctgtttgccctacccttcccgctgcgttacatccaatggtttaccccgcaaccggagaaaaccattcaggtttcgatggttcagggcgatattccgcaatcactgaaatgggatggagatcagcttcttaatacgctgaagatttactacaacgcaacggctccgctgatgggcaaatcatcgttgattatctggccggagtcggcgataaccgatctggaaattaatcagcaaccgttcctcaaagcactggacggtgagttgcgcgataaaggtagctcgctggtaaccgggattgtcgacgcgcgtctcaataagcagaaccgctacgatacctacaacaccatcatcatactgggtaaaggtgcaccatacagctacgaatcagccgatcgctataacaaaaaccatctagtgccgtttggcgagtttgtcccgctggagtcgattctgcgtccgttagcaccgttctttgatctgccgatgtcgtcgttcagccgtgggccatatatccagccgccgctgtcggtaaatggtattgagcttactgcggctatttgctacgagatcattctcggcgagcaagtgcgcgataacttccgcccggataccgactatctgctgactatctccaacgatgcgtggtttggtaagtctattggtccatggcagcacttccagatggcgcgaatgcgtgcgctggagctggcgcgcccactgttgcgcagcaccaacaacggcattacggcggtgattggcccgcagggggaggttcaggcgatgatcccgcagttcacccgcgaggtgttgaccactaatgtgacaccgaccaccggactcacaccgtatgcacgtaccggcaactggccactgtgggtgctgacggcgctgtttggttttgccgctgtgttgatgagtctgcgagcacgtaaacgttga

SEQ ID NO: 4768 - protein, 512 aa, Escherichia coli
MAFASLIERQRIRLLLALLFGACGTLAFSPYDVWPAAIISLMGLQALTFNRRPLQSAAIGFCWGFGLFGSGINWVYVSIATFGGMPGPVNIFLVVLLAAYLSLYTGLFAGVLSRLWPKTTWLRVAIAAPALWQVTEFLRGWVLTGFPWLQFGYSQIDGPLKGLAPIMGVEAINFLLMMVSGLLALALVKRNWRPLVVAVVLFALPFPLRYIQWFTPQPEKTIQVSMVQGDIPQSLKWDGDQLLNTLKIYYNATAPLMGKSSLIIWPESAITDLEINQQPFLKALDGELRDKGSSLVTGIVDARLNKQNRYDTYNTIIILGKGAPYSYESADRYNKNHLVPFGEFVPLESILRPLAPFFDLPMSSFSRGPYIQPPLSVNGIELTAAICYEIILGEQVRDNFRPDTDYLLTISNDAWFGKSIGPWQHFQMARMRALELARPLLRSTNNGITAVIGPQGEVQAMIPQFTREVLTTNVTPTTGLTPYARTGNWPLWVLTALFGFAAVLMSLRARKR

SEQ ID NO: 4769 - DNA, 420 bp, Shigella sonnei
atgacggattatcagccatacaggaaaggaactgtgcttgccccaactgggccatgcaatcatcttcatgtgatttgtaatgatcctgtttattaccccgttaacgattgttattgtgttttagttgttaatatttctagtatcaaggatggtgtcccccacgatccgtcttgcgtcttgaattctggtgatcatcgctttatcaagcatccaagttatgttgtttacgctgaagctataatttggcgagtggataacatggttagaaagcagcgatcgggtgagatttccgttcatgatgatatgccagaagctacattcaatagaattctggacggttttgatatatctgatgaagttacgccaaagaaccttaaatttaaaaataaatattgcgtatcatctattgatgatgagtaa

SEQ ID NO: 4770 - protein, 139 aa, Shigella sonnei
MTDYQPYRKGTVLAPTGPCNHLHVICNDPVYYPVNDCYCVLVVNISSIKDGVPHDPSCVLNSGDHRFIKHPSYVVYAEAIIWRVDNMVRKQRSGEISVHDDMPEATFNRILDGFDISDEVTPKNLKFKNKYCVSSIDDE

SEQ ID NO: 4771 - DNA, 282 bp, Shigella sonnei
atgaataccttgtttttactgatggctgaattcaataccccaaacattgaactctcagcagttagtcaaaaatactttggtatgagtccagccacagcagaagcaaaagcaaacgcttgtaagttgcctgtacctacatatcgcatcggtacatcacaaaaagcaaaacgttgcatcaatattcaggatcttgcggaatacatagacaaaagacgagaagaaggacgtatcgagtgggaacaggtcagaacaggcaaacagaagggcaaagaacatcactaa

SEQ ID NO: 4772 - protein, 93 aa, Shigella sonnei
MNTLFLLMAEFNTPNIELSAVSQKYFGMSPATAEAKANACKLPVPTYRIGTSQKAKRCINIQDLAEYIDKRREEGRIEWEQVRTGKQKGKEHH

SEQ ID NO: 4773 - DNA, 753 bp, Shigella sonnei
atgtggctatggtccttatttgacattaaattcttatctattcttgccgctgccttcactatatattttggcgtgcaaaaaatatcaaaaaaggtgacagtgtcgtattcagcaaatgcaagtagaatatatgacatgcatatatcaaccataatcctgaataataaaagagataatgcaattgctatatcttcaatcaatatggaggttgaaggtaaagggatactacaagttattaaatttgactcccctcttcttttaaagaactatgattctttaaaagttgaaccaccaaaatttagcagcctttacaataatgatggcgtagttaagttagatatttctgataagtttcatttttatataatcacgacatctggagatgaaattaaatgtatttctgaaaataaatatgtagcaccaaacatggaaaacaaaatagctacagacataagaaaatttaatggcattgtcttaacaaacagaatgtcttatatttttttctatgcaaatgacaacggagagaaatactgcataatagatgtttcattgttcataaatggtgacaacccatttcattttaattttttaaaagaagatgaattaagagatttttctagcatccttattagttacggatatcaccaacagtttaaaagttatgcattgtttaaaatagacaaccatcttgctccttctttggttttaaataaatcaatgatagaaaataatattattgaaatgaataagtaa

SEQ ID NO: 4774 - protein, 250 aa, Shigella sonnei
MWLWSLFDIKFLSILAAAFTIYFGVQKISKKVTVSYSANASRIYDMHISTIILNNKRDNAIAISSINMEVEGKGILQVIKFDSPLLLKNYDSLKVEPPKFSSLYNNDGVVKLDISDKFHFYIITTSGDEIKCISENKYVAPNMENKIATDIRKFNGIVLTNRMSYIFFYANDNGEKYCIIDVSLFINGDNPFHFNFLKEDELRDFSSILISYGYHQQFKSYALFKIDNHLAPSLVLNKSMIENNIIEMNK

SEQ ID NO: 4775 - DNA, 417 bp, Shigella sonnei
atgaaaaaggtattaatagcagcgataggtttttgtttagttggttgtgcaggtatgaaattacctgagtattcgcaagttaaagcaagtccgtattatacagattgccgtgcgtttgccatggatgtttataaaaatgatggatacagcaaaattgcgaaaactactatccttagcatggatgatgtgaaagctagatatattgtgacagggtgtgtagttgctatggggaaaaacactgtagaggaaatcaaagctgatctctctgctaaagggagttcttttgggcttatcagtggagcttgttctagtgcggcatgtcgggttgatgtagagcagcaaatgaacgcttatgtacttggtagttattatgctgcaaataaaaaattcccggataaaatgaaagcagagttttaa

SEQ ID NO: 4776 - protein, 138 aa, Shigella sonnei
MKKVLIAAIGFCLVGCAGMKLPEYSQVKASPYYTDCRAFAMDVYKNDGYSKIAKTTILSMDDVKARYIVTGCVVAMGKNTVEEIKADLSAKGSSFGLISGACSSAACRVDVEQQMNAYVLGSYYAANKKFPDKMKAEF

SEQ ID NO: 4777 - DNA, 168 bp, Shigella sonnei
atgcgcaagaggaaaaacctgccccatccctttgaattattacaatttaatgatcttaaagtcaatacaagtgaatggtgtccagagatgatgaacttaatgaacaaaccactcgtcagcagactcccaggtatctttcagagtctcctgaacaaaagttttagctga

SEQ ID NO: 4778 - protein, 55 aa, Shigella sonnei
MRKRKNLPHPFELLQFNDLKVNTSEWCPEMMNLMNKPLVSRLPGIFQSLLNKSFS

SEQ ID NO: 4779 - DNA, 552 bp, Shigella sonnei
atgcatgacaatatttggtttacatataaagcacgtatccaagcgcaccatcgactagaatggcttgaaaaacactctcaatttatcctcgtttggtatgctatattgagtgcggtactttcaattgtaacgttgcgatttccaaaggttctaggagataatacagatgtcgttgcggcgatactttcagtggctctactgggtatttctctgatcgtatctaacctagattttcgtggtcgagcaatagccatgagaaggaattatattgcactacagcgactctattttgacattaccaccagtcaacagttatctcttgaacagaaagaaaaatattttaatttgctcaatgaggttgagaatcaccgtgacatagatgataaaatttcaagggtaactcaagttggacttaagacgaggatccccacacaaaaagaaaaaataattgttattttatggatattacttcgaatatttattactgccgcactttatatactcccattaatatatctttggattgactatgactgcaagcagaatttttaa

SEQ ID NO: 4780 - protein, 183 aa, Shigella sonnei
MHDNIWFTYKARIQAHHRLEWLEKHSQFILVWYAILSAVLSIVTLRFPKVLGDNTDVVAAILSVALLGISLIVSNLDFRGRAIAMRRNYIALQRLYFDITTSQQLSLEQKEKYFNLLNEVENHRDIDDKISRVTQVGLKTRIPTQKEKIIVILWILLRIFITAALYILPLIYLWIDYDCKQNF

SEQ ID NO: 4781 - DNA, 1371 bp, Shigella sonnei
atgactgcaagcagaatttttaaaaagtcattctcgaaaaaaaatcttctaaaagtatactctgaaaaaatcaaagaatcaggagcgattggcatagatcggattcgcccatcaaaacttgatttgacaataaaaaatgagatcactttcatttttgaaaaggttaattctggcaattacaaatttacagcatataaagaaaaattaatatctaaaggcgctaactctacacccagacagatttccataccaactgctagggacagaattactcttagagctctctgtgaatgccttacggaaatatatcctaagtccagattaaaactaccacatacagtaattgactcattgaaagaagcattaaacaacagtctatatgctgaatatgcaaaaatagatcttaaaagtttctatccttcaattgaacataaattgataattaatgcaataaaaaataaaattagaaaaaaagaaattagacagttaataacatcatcattaatcgtgcctactgtaagtggaaccacaggaagcaaaggtatccctaataataccagaggagtacctcagggattagcgatatcaaacattttagctgaaatatcactatctaatttcgatgatgaaatcaataaaatgcatgacatatggtacatgcgatacgttgatgacattcttattttaacaccaaaatatcaagcaacaaaaatagcttctcatatcattgataagcttcaatcattaaatttaaacccacatccattaaatgaagagaactcaaaatccaaagtaggcagcttggatgaaagtttcaactttttgggctaccacataaaaaatcgagaattattgataaaacatgagagcattcttagatttgagtcatccttagcaaaaatttttactgcatatagacacgctctactacaagctaaaaataagcgcgataaagaacgagctgttgcatattgtcagtggaaactaaatcttagaattacgggatgtgtgtttgaaggtaaacgattgggatgggtatcgtacttctcacaaataacgtcaacagctcaacttcgagctgttaatcatacgatcaataatcttatccgccgattcggcctttcatcagaaataaaaccaaagtctttgattaaaactttctatgaactccgcaggggtagagcggagacttttaaatacatacctaactttgacaatctacatatatctcagaaacgagaaattgtttctatgtggatagggaaagagaatgaaaaaaaacttagcaatagtgaaatagagagaaaatttaaatttaaaattgcgaaatcagtaaaagagcttgaagaggacatttcagggatatcatag

SEQ ID NO: 4782 - protein, 456 aa, Shigella sonnei
MTASRIFKKSFSKKNLLKVYSEKIKESGAIGIDRIRPSKLDLTIKNEITFIFEKVNSGNYKFTAYKEKLISKGANSTPRQISIPTARDRITLRALCECLTEIYPKSRLKLPHTVIDSLKEALNNSLYAEYAKIDLKSFYPSIEHKLIINAIKNKIRKKEIRQLITSSLIVPTVSGTTGSKGIPNNTRGVPQGLAISNILAEISLSNFDDEINKMHDIWYMRYVDDILILTPKYQATKIASHIIDKLQSLNLNPHPLNEENSKSKVGSLDESFNFLGYHIKNRELLIKHESILRFESSLAKIFTAYRHALLQAKNKRDKERAVAYCQWKLNLRITGCVFEGKRLGWVSYFSQITSTAQLRAVNHTINNLIRRFGLSSEIKPKSLIKTFYELRRGRAETFKYIPNFDNLHISQKREIVSMWIGKENEKKLSNSEIERKFKFKIAKSVKELEEDISGIS

SEQ ID NO: 4783 - DNA, 522 bp, Shigella sonnei
gtgccccttcagaggagcgaaagctcctcctgccgtccacttcacaggggtttctccccgcagtggacctttccgatgggggcccgtttaccgcctcacggggcagctgtccgggggcggacgcaaaattttttgccgggttcatggctaaaaattttgtggccggtgcatctcaccctggacagatggaacgggagggggttacgtctgccccccggaaagtccacagcggggaaacaggccgcagggggggcggcaggagggaggactgctgcgccatcaggcgcagtttcctcacacaccgtcaggtgtgcagggagcgcaggtcacggcgcgacaggggcggcgcgaccggaacggtcgctgcaagcccgggttttcacgcatcggaccgtagcggcagcccgaaaccgcgccagcgggttcggcggagactggcgggtgcgccagcagctgcccgtcggagtcgggcctgacgaccggatgccgccaggcagccgggagccgaagtgggcgcaataa

SEQ ID NO: 4784 - protein, 173 aa, Shigella sonnei
MPLQRSESSSCRPLHRGFSPQWTFPMGARLPPHGAAVRGRTQNFLPGSWLKILWPVHLTLDRWNGRGLRLPPGKSTAGKQAAGGAAGGRTAAPSGAVSSHTVRCAGSAGHGATGAARPERSLQARVFTHRTVAAARNRASGFGGDWRVRQQLPVGVGPDDRMPPGSREPKWAQ

SEQ ID NO: 4785 - DNA, 963 bp, Enterobacter cloacae complex
atgttgctctgcccgctcctggccggggcgaatcacccgggtctgctgtccgtccgacagcgtgacactgtcaccggaaactgctgtcaccgtccagacactgttggccacataaccgcgctcccggtcactcttcgtgaagcgcatccggtcaccggttcccacccggatggtgtccggggtgtacagtgtgacgccttcagccaccgcctcccggggcgaaatcagccgcgtgttaccttccgcatcctccagggttatcagcccgtcatccttgctgataccggcaatccggtgatacacactatccaccagggcaagggcatccgggttattctcccaggtggagagacgacgcagttctccgtcacgtatattcgctgtgttcaggacaggcaccatgacctgctctttgcccagctcaccggccttttcccgtgcatcatgaatcatgctgttcagtacgcgccggtcctcattcaggtgtgtgacaatcagcgtctgctcccgtgcttccggtgtcctgccggtatagtcgcggacaatggcttcatacagtgtcatggggacatccgggaaagcctcgcctttcagcatcgccttctgctgcgcttctgccagtttcgcttcctggctgtgactgaactccgtcacggagtgctccggtgcccatgcgccctccagacgtggcacctgagacggtttcacactctcaagcccggacagtgccctttccacatcccggttaatcaggctgtataccgcctcccgcagttccggcgtctgacgcacaatctccttcatgatggccacatcggcggcactgcgcatctgctggagacggaaaggctgaccgggcgcgatggcctgcaactggtccgtgtcaccgctggccactgcacgaccaccaccggccgcaatcagggcgtatgcccgtgccatgtcggtattgcccaccattga

SEQ ID NO: 4786 - protein, 320 aa, Enterobacter cloacae complex
MLLCPLLAGANHPGLLSVRQRDTVTGNCCHRPDTVGHITALPVTLREAHPVTGSHPDGVRGVQCDAFSHRLPGRNQPRVTFRILQGYQPVILADTGNPVIHTIHQGKGIRVILPGGETTQFSVTYIRCVQDRHHDLLFAQLTGLFPCIMNHAVQYAPVLIQVCDNQRLLPCFRCPAGIVADNGFIQCHGDIRESLAFQHRLLLRFCQFRFLAVTELRHGVLRCPCALQTWHLRRFHTLKPGQCPFHIPVNQAVYRLPQFRRLTHNLLHDGHIGGTAHLLETERLTGRDGLQLVRVTAGHCTTTTGRNQGVCPCHVGIAHH

SEQ ID NO: 4787 - DNA, 423 bp, Shigella sonnei
atggctgataatcgtaagtgctctttttatatttatccggaacgaaatgcagctgatcgggtggctgacaggtttcttgaaaaattgcctcagaaagaacgtggtcgggcaatgcgggccatgatgttgtgtggtgctgcattgatgaagcaggatgaacgattgccgttcctgatagctgaattcctgacagacagcacgtctatgcaggatattcaacgaattatcagtagtacgctaccacaacaggaaaatggtgaagttgttcgtttgctggaggcatttctgcagtctgccggtaataatgcaaaaacgatcctgcctgcggttgattctgctacgcaagaaatatctgctccagtcgatcagaatctcctggaaacaagaaacaacattaagaacttgtttccggatgatgaataa

SEQ ID NO: 4788 - protein, 140 aa, Shigella sonnei
MADNRKCSFYIYPERNAADRVADRFLEKLPQKERGRAMRAMMLCGAALMKQDERLPFLIAEFLTDSTSMQDIQRIISSTLPQQENGEVVRLLEAFLQSAGNNAKTILPAVDSATQEISAPVDQNLLETRNNIKNLFPDDE

SEQ ID NO: 4789 - DNA, 336 bp, Shigella sonnei
atgcgaacgatcaccacacgtgaacagttattagtgaacggaaaagtcagggaacggattgccacacatatcgtgacaggcgctcacgggtatgaaacgctttgcacaagtggttataacttacaatacaataaggaacgggtactgattgaaaactgcgaaaaggtggctgatggagaactgcctgtcacctgccacacctgtttttctatatggcaggatgtacaccggttcaaacctggtgactttgacacagaatcaggaaagggaaatttcactgatacggagctcacgaaaatcacaattggacaagaaaaaacgccgaatgcgtgttga

SEQ ID NO: 4790 - protein, 111 aa, Shigella sonnei
MRTITTREQLLVNGKVRERIATHIVTGAHGYETLCTSGYNLQYNKERVLIENCEKVADGELPVTCHTCFSIWQDVHRFKPGDFDTESGKGNFTDTELTKITIGQEKTPNAC

SEQ ID NO: 4791 - DNA, 324 bp, Shigella sonnei
atgggcagaaatatgtcagcagcacgtaccgatggctttattcgtaatattcattcccgcaatccctttgatgttatccgggctgatgtggtgatcagcaggctggaaaagcaggctcattggggatgtggtctgcactatgaaatttatgaagcgaatttgtttgatatggcgatgaatcatctttcccggcttcctctgaaggatcgtccggtattcattggtgctgctgcacgaaaggggctttttctgacgatggaagaaaccaggctggcacgggaagcgaaagatgctctgatggctgaacttgctctggaatactga

SEQ ID NO: 4792 - protein, 107 aa, Shigella sonnei
MGRNMSAARTDGFIRNIHSRNPFDVIRADVVISRLEKQAHWGCGLHYEIYEANLFDMAMNHLSRLPLKDRPVFIGAAARKGLFLTMEETRLAREAKDALMAELALEY

SEQ ID NO: 4793 - DNA, 405 bp, Shigella sonnei
atgaaggataatatcgtagattttcaaagaatcagggacagcatgaatgatcattcaaccgatgttgcaaatgatgccgtttattctgacaaaaagaaaatatccaggttcttttatctgctgacacctgtcagataccttctggctgcttccctttatctggttgttgttattccattggggattcttgcgggatttcgtttcttgttgcagtttttaggcggtatcgcagtgatgggtttaactatcgcctggtacatgggtgcagatgtcagtagttacgttgttcttgctgcatggatcgccttaactgtttgtggttgcgcagagcagatttttgaatggtggatcgaaagccgttttgcgttccgtctttttggtatcgggagaacgccggaagaatga

SEQ ID NO: 4794 - protein, 134 aa, Shigella sonnei
MKDNIVDFQRIRDSMNDHSTDVANDAVYSDKKKISRFFYLLTPVRYLLAASLYLVVVIPLGILAGFRFLLQFLGGIAVMGLTIAWYMGADVSSYVVLAAWIALTVCGCAEQIFEWWIESRFAFRLFGIGRTPEE

SEQ ID NO: 4795 - DNA, 528 bp, Shigella sonnei
atgatatttaaccgtaataaaaaacgagatgaacaacataattctgctgttgttttgccatcaactgaaaacgtattctctgattttattaagaataatccagctttgataaccaatgcttttacagctattggggaggttgattgttttactaaagtacccttactctcaaataaggaatcagagtttttaggcattctttcacgtaatattatacctgattattccgtttttcccaaaatacggctcattgaatttgttcgtcctcatggtagcgaggaagctgtaaaagatttaatccgtgaagtgcagaatataacctgtgattttgtcctgaaatcatatgatgaaacagtcctggctgttatccagtttggtgaaaccgcaaccgtcagacagcaaaagaaaaaactgattatccagcgtgtgtgtgctatgacaggaatttcttttttcgaatttaaaaatactgtcgatatgatgggaagcgaagacttttgtcagttcctgcgggatgatgaggagtaa

SEQ ID NO: 4796 - protein, 175 aa, Shigella sonnei
MIFNRNKKRDEQHNSAVVLPSTENVFSDFIKNNPALITNAFTAIGEVDCFTKVPLLSNKESEFLGILSRNIIPDYSVFPKIRLIEFVRPHGSEEAVKDLIREVQNITCDFVLKSYDETVLAVIQFGETATVRQQKKKLIIQRVCAMTGISFFEFKNTVDMMGSEDFCQFLRDDEE

SEQ ID NO: 4797 - DNA, 1002 bp, Shigella sonnei
atgaatatgatgatctcatatcaggaacttgttcgcaccttccttagctttgaccctccgcccatgcagggttggaaattacatgtaaaaggacgttcttctaacgaggataaggattatttagttgaggaaatagtaggtttagaaatcaacgctatgcttcctagcacaacagctattagccatgcctcttttcaggaaaaggaggcaggtgatggtagtacgcagcacatagcggtttcaacagagtcagttgttgatgatgagcatctacagttggacgatgaggaaacagccaatatagacacagacacacgagtcatagaggctgagccgacatggataagttttagtagacctagtcgaattgaaaaatctcgcagggcaagaaaaagtagccaaactattttagaaaaagaagaagcaacaacaagtgaaaatagtaatttggttagtactgatgagccacacttaggtggtgtcctagcagcggcagatgtgggtgggaagcaggatgcaaccaattacaactctatttttgctaatcgatttgctgcttttgatgagctactttcaattctaaaaactaaatttgcatgtcgggtgctttttgaagaaaccttggttttgccaaaagttgggcgtagccgattacatctgtgtaaagatggctcaccaagagtgattaaagccgttggggtgcaacgtaatggcagtgaatttgtattgctagaggtggatgcatcggatggggtgaaaatgctttctaccaaagtgttgagtggcgttgatagcgaaacatggcggaatgattttgaaaagatacggcgtggagtggtgaagagctcattgaattggccaaatagtttgtttgatcaattatatggacaagacgggcatagaggggtgaatcatccaaaggggttgggggagctgcaagtatcgagagaggatatggaagggtgggctgagagagtggttagagagcaatttacgcattaa

SEQ ID NO: 4798 - protein, 333 aa, Shigella sonnei
MNMMISYQELVRTFLSFDPPPMQGWKLHVKGRSSNEDKDYLVEEIVGLEINAMLPSTTAISHASFQEKEAGDGSTQHIAVSTESVVDDEHLQLDDEETANIDTDTRVIEAEPTWISFSRPSRIEKSRRARKSSQTILEKEEATTSENSNLVSTDEPHLGGVLAAADVGGKQDATNYNSIFANRFAAFDELLSILKTKFACRVLFEETLVLPKVGRSRLHLCKDGSPRVIKAVGVQRNGSEFVLLEVDASDGVKMLSTKVLSGVDSETWRNDFEKIRRGVVKSSLNWPNSLFDQLYGQDGHRGVNHPKGLGELQVSREDMEGWAERVVREQFTH

SEQ ID NO: 4799 - DNA, 918 bp, Shigella sonnei
atggttcagaaaattttgtcggataaggttatgaatgaaagaacaaatgcgtattactcttattatcttggagagcgtaatatctccgtactgccccttaatgtttatgatcccccggaacgttttatcgcttacataaaaaaaaacagagaaaatctgaacatcacactttcagattttgaacttgaacaaataatttctggtatgcgtctgaaggccctggccttcctggtccccctggaaaaaatatcctggatcgcgggcagtgaacgcgcatgcttattttcctggtatctgttgatgcagtttatccagaataacagggcaaaaataagcgcagacttgcttcaaaagaataaactgtatcttaaagaagagtatctggaagggaatgccttcccgtcggactcatcgacacagttcagacaaatactcagagttctcgatattctttctgataagaatttgcgggatgagtggataatccagaccaaagacagatggatgcgggcatttaaatcaaagagtcctttcagttacctcctcccggagaacgaacatgaatgcatatggacatggaattatttgaagggaaaaaatattgcactggaaaaactggccagttttcctggttctgctgatatttaccacgcaattcacctttcatttgacatatgggttacctgtccactcacctcacctgacgatataaaaaatttcagaaacagtttcaataaggccaaggcgcagcgcaagtacaaaaaaatgcaggaagataaagtcaatgtacagttttttcttgacgcagaaaccagggcgcagctcaaagaattatcgagggtcagaagactcagtaccggcgaaatgctgcatgacctgattgttgaagagtataaaaggtaccgacattccagataa

SEQ ID NO: 4800 - protein, 305 aa, Shigella sonnei
MVQKILSDKVMNERTNAYYSYYLGERNISVLPLNVYDPPERFIAYIKKNRENLNITLSDFELEQIISGMRLKALAFLVPLEKISWIAGSERACLFSWYLLMQFIQNNRAKISADLLQKNKLYLKEEYLEGNAFPSDSSTQFRQILRVLDILSDKNLRDEWIIQTKDRWMRAFKSKSPFSYLLPENEHECIWTWNYLKGKNIALEKLASFPGSADIYHAIHLSFDIWVTCPLTSPDDIKNFRNSFNKAKAQRKYKKMQEDKVNVQFFLDAETRAQLKELSRVRRLSTGEMLHDLIVEEYKRYRHSR

SEQ ID NO: 4801 - DNA, 129 bp, Shigella sonnei
atgaaaagaggcgtgtcccgtaaatataacgaatcatcgcaggatatacattatcaggtgataccagagggcattaaactgtcgccacggataagaatatacaacatttctgataacaaaacatcataa

SEQ ID NO: 4802 - protein, 42 aa, Shigella sonnei
MKRGVSRKYNESSQDIHYQVIPEGIKLSPRIRIYNISDNKTS

SEQ ID NO: 4803 - DNA, 603 bp, Shigella sonnei
atgaaacaacagtatcagacccgctacgaatggctccacgaaagctaccagaaatggctgaccggcttcacccggcacgccgtatcctggggcgtgtgtcatccgaatatctactacttccataatctgacgcccggttgggtgtcattcaatggtgaaaaaccggagattgccatcgtaccccagagcctgcaccggctgatttatggccctgacaaacgggccacgccgcccctggatgatgatctgatagtgaatttatgcaccagtgaacatctgctggttcatcatccgatgctggaaggcattctcctgtctgaatgtgaacgtctgaggcagcgttctctggcaaataaactgatcagcctcttccgtcagtttggtggcacggagttgcgcctcaaactggtctggctttgctggcttgatttaatgaccggaaacagccttgaagactggaaagagaacctgaaacggaaatcagaaaaagagctggaggaatggatcatcaaccgtcagaggcagagcgcagcactgacggatctgatggatcagtacgtgctcctggcataccgcacaacggttgacgatagccgcaactga

SEQ ID NO: 4804 - protein, 200 aa, Shigella sonnei
MKQQYQTRYEWLHESYQKWLTGFTRHAVSWGVCHPNIYYFHNLTPGWVSFNGEKPEIAIVPQSLHRLIYGPDKRATPPLDDDLIVNLCTSEHLLVHHPMLEGILLSECERLRQRSLANKLISLFRQFGGTELRLKLVWLCWLDLMTGNSLEDWKENLKRKSEKELEEWIINRQRQSAALTDLMDQYVLLAYRTTVDDSRN

SEQ ID NO: 4805 - DNA, 207 bp, Shigella sonnei
atggctaccccagtttcactgatggatgaccagatggtcgacatggcatttatcactcaactgaccggcctgacagataagtggttttacaggctcatcagggatggggcctttccggctcccatcaagctgggccgcagctcccgctggctgaaaagtgaagtggaagcctggctacaggcgcgtattgcacagccccgcccgtaa

SEQ ID NO: 4806 - protein, 68 aa, Shigella sonnei
MATPVSLMDDQMVDMAFITQLTGLTDKWFYRLIRDGAFPAPIKLGRSSRWLKSEVEAWLQARIAQPRP

SEQ ID NO: 4807 - DNA, 267 bp, Shigella sonnei
gtggctgagccgtaccggtataccgggtggttgttgcgaaaagatgcttccgcacgcacgcgcgataaagaggggatagttttcgtgaggacagggagagaagcaggcgttctgataattgcagagttgttttcggaggtagttacagtgagtcagcccgttcctggcgaggaggagactgatatcaccgatgggataaggctgtctgattggtattataaatataagaagtcatcagagagtaacgtaaaggatttgccagagtaa

SEQ ID NO: 4808 - protein, 88 aa, Shigella sonnei
MAEPYRYTGWLLRKDASARTRDKEGIVFVRTGREAGVLIIAELFSEVVTVSQPVPGEEETDITDGIRLSDWYYKYKKSSESNVKDLPE

SEQ ID NO: 4809 - DNA, 201 bp, Shigella sonnei
atggtgatacgcaaaaagaagtgcagggactgtggaaacgcgattactcataatacagtgtgttgcccgtattgtggttctgtcgaccccttcggctactaccggaatacagaccgtatcgttaccatactgctggcgctgattattgtggtcctgctgactactgtcagcgtcagtgtgtgtatactgtgtagctggtga

SEQ ID NO: 4810 - protein, 66 aa, Shigella sonnei
MVIRKKKCRDCGNAITHNTVCCPYCGSVDPFGYYRNTDRIVTILLALIIVVLLTTVSVSVCILCSW

SEQ ID NO: 4811 - DNA, 570 bp, Shigella sonnei
atgacctacaaatacaaccccttctggcagcaacgtattcgtgagacggtgcggcacgcactgaatgttcatccccgcctgacggcattgcgggttgacctgcgtctcccggatgtaccggcagcaacggacgcagctgtgatatcccgcttcatcaatgccctgaaagcccgaatcgacgcttaccagaaacgtaagcatcgggaaggtaaacgcgtgcatcccacaaccctgcattacgtctgggcccgggagtttggggagtgcaaaggtaaaaaacactatcacctgatgctgctggtcaaccgggatacctggtgtcgtgccggtgattaccgcgctccggagtctctggccgggatgattaaacaggcgtggtgcagtgccctgggagtggatgtcgggtgccatgccacgctggtgcattttccggcctggccggcggtgtggctggcgcgtaatgatgacaccggctttcagcaagtgctggaacgtgctgactatctggcgaaggagcataccaaagctcactgcaccggtgagcgcaattttggctgtagccggagttga

SEQ ID NO: 4812 - protein, 189 aa, Shigella sonnei
MTYKYNPFWQQRIRETVRHALNVHPRLTALRVDLRLPDVPAATDAAVISRFINALKARIDAYQKRKHREGKRVHPTTLHYVWAREFGECKGKKHYHLMLLVNRDTWCRAGDYRAPESLAGMIKQAWCSALGVDVGCHATLVHFPAWPAVWLARNDDTGFQQVLERADYLAKEHTKAHCTGERNFGCSRS

SEQ ID NO: 4813 - DNA, 402 bp, Shigella sonnei
atgtacgcaaaatcctttatcgctcttgatggcaacggacgtctgacgggcgcccgtactgcacaggccgcaccttatgctaactacacctgccacttgtgtggcagtgcactcagataccatccgcaatacgaaactgaacttccctggtttgaacacactgacgacaggctgacagagcacggtcaacagtgcccttatgtcaggccggagcgcagagaaatacagttgattaaacgtctgcagcaattcgtaccggatgccttacccgtggtgcgtaaagccagctggcactgcagacaatgtcaccacgattattatggggagcagtactgcacacactgccagaccggaggattcagtattccccggacaactcaggaggaaatatgcgaattctga

SEQ ID NO: 4814 - protein, 133 aa, Shigella sonnei
MYAKSFIALDGNGRLTGARTAQAAPYANYTCHLCGSALRYHPQYETELPWFEHTDDRLTEHGQQCPYVRPERREIQLIKRLQQFVPDALPVVRKASWHCRQCHHDYYGEQYCTHCQTGGFSIPRTTQEEICEF

SEQ ID NO: 4815 - DNA, 687 bp, Shigella sonnei
atgtgtgcccgcatcactgaagctgaccagaaccggccagatggcatcgaggaggcgttgtttttccggccggaaagcatatttgcgaccgacgaacgtccgtttctgcacataaaaaggatgccgcgacatgcgcatgcgcaggctatgctcgccggtcaccgggtcctttttcaccagacggtgataggcgtgcccgagctgcccgctcagcgccttatagcgcgcaggacgataccaggacggattttcacatttgggtttggtggagtgctcgccacgacggcgcttcgtgcgcttcctttctggctcaaccaggaaagaggtagcccttcccgcctcatattcttcccagaaacggatttgctcttcagccggaagctgactccagtgtttttgaggggtgtatctttcagccacaccttcctgcacttatgttgcgcagaaagagtgagcacagaaagaagtcttgaacttttccgggcatataactatactccccgcatagagcaacagcttctatgcagtttcttgttagccccggtaatctttctgtactcgccaaagttagagaagattatcggggttttcgcttttctggctcctgtaaacccacatcagaagccagttccctgccaccttacggcgtggccaaccacaaaattccttaaacgatcagtaatctag

SEQ ID NO: 4816 - protein, 228 aa, Shigella sonnei
MCARITEADQNRPDGIEEALFFRPESIFATDERPFLHIKRMPRHAHAQAMLAGHRVLFHQTVIGVPELPAQRLIARRTIPGRIFTFGFGGVLATTALRALPFWLNQERGSPSRLIFFPETDLLFSRKLTPVFLRGVSFSHTFLHLCCAERVSTERSLELFRAYNYTPRIEQQLLCSFLLAPVIFLYSPKLEKIIGVFAFLAPVNPHQKPVPCHLTAWPTTKFLKRSVI

SEQ ID NO: 4817 - DNA, 315 bp, Shigella sonnei
atgggagttgagcagaatgatttcagggacatgttctccgtttatctgtccggcccgccgcagacgcagcatatgttttgtgtattcccggcgacccgggtcacgcacacgtgtctggcaggcgaagaatggctgaaagccttcccgctgcaggctttccagtacggtgatggtgggagtgtacgcatagcgtttactgcgggaagtatgccggtcttcaccgaaaatactgggaacatagtgcatcagttcttcgtgtgtcagcggacggtcacggcgtatctggtttgcagcataaccaaaacgactggctag

SEQ ID NO: 4818 - protein, 104 aa, Shigella sonnei
MGVEQNDFRDMFSVYLSGPPQTQHMFCVFPATRVTHTCLAGEEWLKAFPLQAFQYGDGGSVRIAFTAGSMPVFTENTGNIVHQFFVCQRTVTAYLVCSITKTTG

SEQ ID NO: 4819 - DNA, 255 bp, Shigella sonnei
atggattcagaaacagttcacggaacggtcaggtctggcgctggcagcgtgccggaagccgggccgttattctggaggtcagtggacgctggatggaagcggcagaagcatggcgacgggctgccggtgttgcaccccggacagactggcagcagtttgcccgaaaaagggctgaacaatgccaccggcgctgccggggaagggtgtaacgaaaaagcagccttcattactccagggattcagaaggctgaataa

SEQ ID NO: 4820 - protein, 84 aa, Shigella sonnei
MDSETVHGTVRSGAGSVPEAGPLFWRSVDAGWKRQKHGDGLPVLHPGQTGSSLPEKGLNNATGAAGEGCNEKAAFITPGIQKAE

SEQ ID NO: 4821 - DNA, 543 bp, Shigella sonnei
atggcctgcagctggtccgtgtcaccactggccacggcacgaccgccaccggccgcaatcagggcgtatgcccgtgccatctcggtattgcccaccattgagctctcatcgagcaggaacagcgtgttgctgaaatccggcgtttctccgctgcgctgctgcagctgcgtgtcatgcagaaaggacgccagtgtctgcgcatccacgccggcgctgcgcatctccccgaccgcacggtgcgtgggccccagccccacaacacggggacgctcactcgccggcagcatgttcacggctgacatcaccgcccggaactgtgtggtcttacccacaccggcatacccctgtaccaccgtgaaacggtcggacgtttccagtatcatacgggtggcggcacgctgtcccgacgtcagtgtctccatgagttcgccgggtactctctccatcagcggcgtgaccgcctccttaccttcgagaatatggcgaagaatacttttttctgcctcatacgacgcacgggaaaccagcaggcctgtgccatag

SEQ ID NO: 4822 - protein, 180 aa, Shigella sonnei
MACSWSVSPLATARPPPAAIRAYARAISVLPTIELSSSRNSVLLKSGVSPLRCCSCVSCRKDASVCASTPALRISPTARCVGPSPTTRGRSLAGSMFTADITARNCVVLPTPAYPCTTVKRSDVSSIIRVAARCPDVSVSMSSPGTLSISGVTASLPSRIWRRILFSASYDARETSRPVP

SEQ ID NO: 4823 - DNA, 816 bp, Acinetobacter baumannii
atgagccatattcaacgggaaacgtcttgctcgaggccgcgattaaattccaacatggatgctgatttatatgggtataaatgggctcgcgataatgtcgggcaatcaggtgcgacaatctatcgattgtatgggaagcccgatgcgccagagttgtttctgaaacatggcaaaggtagcgttgccaatgatgttacagatgagatggtcagactaaactggctgacggaatttatgcctcttccgaccatcaagcattttatccgtactcctgatgatgcatggttactcaccactgcgatccccgggaaaacagcattccaggtattagaagaatatcctgattcaggtgaaaatattgttgatgcgctggcagtgttcctgcgccggttgcattcgattcctgtttgtaattgtccttttaacagcgatcgcgtatttcgtctcgctcaggcgcaatcacgaatgaataacggtttggttgatgcgagtgattttgatgacgagcgtaatggctggcctgttgaacaagtctggaaagaaatgcataagcttttgccattctcaccggattcagtcgtcactcatggtgatttctcacttgataaccttatttttgacgaggggaaattaataggttgtattgatgttggacgagtcggaatcgcagaccgataccaggatcttgccatcctatggaactgcctcggtgagttttctccttcattacagaaacggctttttcaaaaatatggtattgataatcctgatatgaataaattgcagtttcatttgatgctcgatgagtttttctaa

SEQ ID NO: 4824 - protein, 271 aa, Acinetobacter baumannii
MSHIQRETSCSRPRLNSNMDADLYGYKWARDNVGQSGATIYRLYGKPDAPELFLKHGKGSVANDVTDEMVRLNWLTEFMPLPTIKHFIRTPDDAWLLTTAIPGKTAFQVLEEYPDSGENIVDALAVFLRRLHSIPVCNCPFNSDRVFRLAQAQSRMNNGLVDASDFDDERNGWPVEQVWKEMHKLLPFSPDSVVTHGDFSLDNLIFDEGKLIGCIDVGRVGIADRYQDLAILWNCLGEFSPSLQKRLFQKYGIDNPDMNKLQFHLMLDEFF

SEQ ID NO: 4825 - DNA, 1200 bp, Shigella sonnei
gtgaaacccaacagacccctgatcgtaattctgagcactgtcgcgctcgacgctgtcggcatcggcctgattatgccggtgctgccgggcctcctgcgcgatctggttcactcgaacgacgtcaccgcccactatggcattctgctggcgctgtatgcgttgatgcaatttgcctgcgcacctgtgctgggcgcgctgtcggatcgtttcgggcggcggccggtcttgctcgtctcgctggccggcgctgctgtcgactacgccatcatggcgacggcgcctttcctttgggttctctatatcgggcggatcgtggccggcatcaccggggcgactggggcggtagccggcgcttatattgccgatatcactgatggcgatgagcgcgcgcggcacttcggcttcatgagcgcctgtttcgggttcgggatggtcgcgggacctgtgctcggtgggctgatgggcggtttctccccccacgctccgttcttcgccgcggcagccttgaacggcctcaatttcctgacgggctgtttccttttgccggagtcgcacaaaggcgaacgccggccgttacgccgggaggctctcaacccgctcgcttcgttccggtgggcccggggcatgaccgtcgtcgccgccctgatggcggtcttcttcatcatgcaacttgtcggacaggtgccggccgcgctttgggtcattttcggcgaggatcgctttcactgggacgcgaccacgatcggcatttcgcttgccgcatttggcattctgcattcactcgcccaggcaatgatcaccggccctgtagccgcccggctcggcgaaaggcgggcactcatgctcggaatgattgccgacggcacaggctacatcctgcttgccttcgcgacacggggatggatggcgttcccgatcatggtcctgcttgcttcgggtggcatcggaatgccggcgctgcaagcaatgttgtccaggcaggtggatgaggaacgtcaggggcagctgcaaggctcactggcggcgctcaccagcctgacctcgatcgtcggacccctcctcttcacggcgatctatgcggcttctataacaacgtggaacgggtgggcatggattgcaggcgctgccctctacttgctctgcctgccggcgctgcgtcgcgggctttggagcggcgcagggcaacgagccgatcgctga

SEQ ID NO: 4826 - protein, 399 aa, Shigella sonnei
MKPNRPLIVILSTVALDAVGIGLIMPVLPGLLRDLVHSNDVTAHYGILLALYALMQFACAPVLGALSDRFGRRPVLLVSLAGAAVDYAIMATAPFLWVLYIGRIVAGITGATGAVAGAYIADITDGDERARHFGFMSACFGFGMVAGPVLGGLMGGFSPHAPFFAAAALNGLNFLTGCFLLPESHKGERRPLRREALNPLASFRWARGMTVVAALMAVFFIMQLVGQVPAALWVIFGEDRFHWDATTIGISLAAFGILHSLAQAMITGPVAARLGERRALMLGMIADGTGYILLAFATRGWMAFPIMVLLASGGIGMPALQAMLSRQVDEERQGQLQGSLAALTSLTSIVGPLLFTAIYAASITTWNGWAWIAGAALYLLCLPALRRGLWSGAGQRADR

SEQ ID NO: 4827 - DNA, 552 bp, Citrobacter koseri
atgagagccgcgacgggtatccagcttctccctgacggctttgaaggaacggaacagcgcccagcctttcggatcaaacacgatgatattcaccactccgctggcgttcagcgcataggcttcgatatcgtcggtcgggtcatacgtggacttgtcacgcttgctccactccgtaccaccggactgtgtgatgttgttcgccgcactgcggcccatatccacctcaaccggatcgaaggcttcaccggtcatggtgtatttgcccttaagcacggcagaaacggcctgcatctcttcgacctgggcaatggccagctcttcatcacgcatgttctgcatgatgatgcgacggcggcggtaagccgggtccgccagattctgcggatcttcatccggcaggcgacgcagggtcatctgcggattcacctcatgcttgggtttgacatatcccggcgtaaattcagaggtggagccgccacgggaacggataacctcaccggaaacaatcggcgaaacgtacagcgccatgtttaccagtcccggaatttgtga

SEQ ID NO: 4828 - protein, 183 aa, Citrobacter koseri
MRAATGIQLLPDGFEGTEQRPAFRIKHDDIHHSAGVQRIGFDIVGRVIRGLVTLAPLRTTGLCDVVRRTAAHIHLNRIEGFTGHGVFALKHGRNGLHLFDLGNGQLFITHVLHDDATAAVSRVRQILRIFIRQATQGHLRIHLMLGFDISRRKFRGGAATGTDNLTGNNRRNVQRHVYQSRNL

SEQ ID NO: 4829 - DNA, 144 bp, Citrobacter freundii
atgcggctgttttctgccgcaaccgcagcggtgatctgcgcgttcacgtccggctgcgccgcgctggcgttttcgccctccgtcgctggcaccacgtcagtaacgtcagcctgcgaagcagtggctgaaacagttgttgattga

SEQ ID NO: 4830 - protein, 47 aa, Citrobacter freundii
MRLFSAATAAVICAFTSGCAALAFSPSVAGTTSVTSACEAVAETVVD

SEQ ID NO: 4831 - DNA, 180 bp, Shigella sonnei
atggcgacaaaagcagtaaacgcaaaatcacaaaccgttgcggcaagggttccgcatgaggttatggacaatgttgaagcagtaaaaatgcctggcgaaagtacaggacaatttgtcactgcagcattaaaacgagaagttgagtaccgccagcgccgcaaggccaaagaactggaatag

SEQ ID NO: 4832 - protein, 59 aa, Shigella sonnei
MATKAVNAKSQTVAARVPHEVMDNVEAVKMPGESTGQFVTAALKREVEYRQRRKAKELE

SEQ ID NO: 4833 - DNA, 1323 bp, Klebsiella oxytoca
atgtctgcaacaaaactgacccgccgcgaacaacgcgcccgggcccaacattttatcgacaccctggaaggcaccgcctttcccaactcaaaacgcatttatatcactggcacacaccccggcgtgcgcgtgccgatgcgtgagatccagcttagcccgacgctaattggcggtagcaaagaacagccgcagtacgaagaaaacgaagcgattccggtctacgacacctccggcccgtatggtgatccgcagatcgccattaacgtgcagcaagggctggcaaaactacgccagccgtggatcgatgcgcgcggcgataccgaagaacttaccgtgcgcagttccgattacaccagaacgcggctggcagatgatggtctcgacgagctacgttttagcggcttattaacgccaaaacgcgccaaaacaggacgccgtgtcacccaactgcactacgcccgccagggcatcatcacgccggaaatggaattcatcgccatccgcgagaatatgggccgcgagcgcatccgtagcgaggttttacgccaccagcatccgggaatgagctttggcgcacatctgccggaaaatatcactgcggaatttgtccgtgatgaagttgctgccggacgtgcgattatcccggccaacattaatcatccggaatcggagccgatgattattggtcgcaatttcctggtaaaagttaacgccaatatcggcaactcggcggtcacctcttccatcgaagaagaagtggaaaagctggtatggtccacgcgctggggagcggatacggtgatggatctctccaccggtcgctatattcacgaaacccgcgagtggattttgcgtaacagcccggtgccgatcggtacagtgccgatctaccaggcgctggagaaggttaacgggatcgccgaagatcttacctgggaagcgttccgcgacacgctgctggaacaggccgagcaaggtgtggattacttcactatccatgcgggcgtactgctgcgctatgtgccgatgaccgcgaaacgcctgaccggtatcgtctctcgcggcggttcgattatggcgaaatggtgcctctcccatcatcaggaaaatttcctctatcaacacttccgcgaaatttgtgaaatctgtgccgcttatgacgtttcgctgtcgctgggcgacggtctgcgccccggttctattcaggacgccaacgatgaagcgcagtttgccgagctgcatacgctgggcgaactgaccaaaattgcctgggaatatgacggagtgacatcaacgggctggcgcagcagcgcccgcagataa

SEQ ID NO: 4834 - protein, 440 aa, Klebsiella oxytoca
MSATKLTRREQRARAQHFIDTLEGTAFPNSKRIYITGTHPGVRVPMREIQLSPTLIGGSKEQPQYEENEAIPVYDTSGPYGDPQIAINVQQGLAKLRQPWIDARGDTEELTVRSSDYTRTRLADDGLDELRFSGLLTPKRAKTGRRVTQLHYARQGIITPEMEFIAIRENMGRERIRSEVLRHQHPGMSFGAHLPENITAEFVRDEVAAGRAIIPANINHPESEPMIIGRNFLVKVNANIGNSAVTSSIEEEVEKLVWSTRWGADTVMDLSTGRYIHETREWILRNSPVPIGTVPIYQALEKVNGIAEDLTWEAFRDTLLEQAEQGVDYFTIHAGVLLRYVPMTAKRLTGIVSRGGSIMAKWCLSHHQENFLYQHFREICEICAAYDVSLSLGDGLRPGSIQDANDEAQFAELHTLGELTKIAWEYDGVTSTGWRSSARR

SEQ ID NO: 4835 - DNA, 915 bp, Shigella sonnei
atgccaaatacaattcattaccctcatgtaataccatttatatcccaaggaaaaataaatgctataaaaagcacgtttggtaataacctgtctgatagggagtgctacgggatatatatatggagccagaaagcctcatctgccatatatccattactgcaacaactcgaagttactttgagaaactcgattgataaagaagcgacaaaactaataggccaaaaatggtgggataatgtatacaccgacacatcaaaaagcaaacacggtgacttcatacataatataaacaaagcaataagaagatatgagaatgaattcaagaaaaaaaacccatcaatggcaaataccaaaataattgcacctcatgatgacatcattgcacacacagatttttacacatggcaagcggttttgagcgatgcttttcatacacaatcaagatctgaagcatcaagagccttatggcccaggctcacctacagagtactgaagggattagatagaagcaaagatgaaggcacagccagaattgatttcttaaacgagctgaatgagatcagaaactacagaaataggttatcgcataatgattgcatatggataaaaatacactctaaaaatttgcaatctgcagtagaaacaataagagaaaaaataaacaaaatagaaggactgataaaaacgataaacccacaggtacacctatcattaacgaagtggggttccttttatcacgccaaaagaatatgttctcaaaaagaggccgaattgcatctaggcaaaggaataatcaatagcacaacagatgagatgaacacaattctagatcaactatacgcactaactgctgacggaaagctaacgggtgttgtaaaacgaaataccaacaatatcgcatttcacaagttttag

SEQ ID NO: 4836 - protein, 304 aa, Shigella sonnei
MPNTIHYPHVIPFISQGKINAIKSTFGNNLSDRECYGIYIWSQKASSAIYPLLQQLEVTLRNSIDKEATKLIGQKWWDNVYTDTSKSKHGDFIHNINKAIRRYENEFKKKNPSMANTKIIAPHDDIIAHTDFYTWQAVLSDAFHTQSRSEASRALWPRLTYRVLKGLDRSKDEGTARIDFLNELNEIRNYRNRLSHNDCIWIKIHSKNLQSAVETIREKINKIEGLIKTINPQVHLSLTKWGSFYHAKRICSQKEAELHLGKGIINSTTDEMNTILDQLYALTADGKLTGVVKRNTNNIAFHKF

SEQ ID NO: 4837 - DNA, 195 bp, Shigella sonnei
gtgaacaaacaacaacaaactgcgctgaatatggcgcgatttatcaaaagccagagcctgacactgcttgaaaaactggatgctctggatgccgacgaacaggcagccatgtgcgaacgactgcacgaactcgcggaagaactccagaacagcatccaggttcgctttgagaccgaaagtgaaacaggaacataa

SEQ ID NO: 4838 - protein, 64 aa, Shigella sonnei
MNKQQQTALNMARFIKSQSLTLLEKLDALDADEQAAMCERLHELAEELQNSIQVRFETESETGT

SEQ ID NO: 4839 - DNA, 492 bp, Shigella sonnei
atgcaaatttcaccggttactcttcgtgttgcgaaggcgtttatatccagacatcaccgacacaataaaccacctgttgggcataaattcagcattggtctgagaaatgatgccggagaattgataggtgtggcgacagctggtagacctgttgcacgacatttggacgatggattaacacttgaagtaaatcgcacatgtaccacaggagaacgcaacgctaacagcgcgctttatggtgctgtctggcgggcagcaaaagctatgggttatcaacgttgtattacgtacacccaggcagatgaatcaggagcatctcttcgcgcagctggttttgttcgtgtgaaagagcttcctccaagaaaaagctgggcggaatcaagcgtcgccctgcggagtaaacgcgatccggtcggaaacggtggtgttcctcgtgtgctttgggaaatcaggagaatgagtaccactggcattcgcatcaaaggagagtga

SEQ ID NO: 4840 - protein, 163 aa, Shigella sonnei
MQISPVTLRVAKAFISRHHRHNKPPVGHKFSIGLRNDAGELIGVATAGRPVARHLDDGLTLEVNRTCTTGERNANSALYGAVWRAAKAMGYQRCITYTQADESGASLRAAGFVRVKELPPRKSWAESSVALRSKRDPVGNGGVPRVLWEIRRMSTTGIRIKGE

SEQ ID NO: 4841 - DNA, 258 bp, Salmonella enterica
atgtacagaaaaaaacatcacctaataaaaatatttttattaaaaatggcgtgcaatgttttttctttcctgctgggtgctttcatactttcagcaccgtttgtcttatatacattaaccggttcagttctgaatgccgttattcatttcaccttttctttgcctttagccaccatattactggtttatgcttattcaggctttgaagaaagcatttatttattcatggcatacaaatatgactcaagcaaaagctaa

SEQ ID NO: 4842 - protein, 85 aa, Salmonella enterica
MYRKKHHLIKIFLLKMACNVFSFLLGAFILSAPFVLYTLTGSVLNAVIHFTFSLPLATILLVYAYSGFEESIYLFMAYKYDSSKS

SEQ ID NO: 4843 - DNA, 225 bp, Shigella sonnei
atgaaaacggtgaacggaacgcgaaatcctttcgcgggtcgtgaggcgttggacaagcgaagcgcgtcagtttttccggctcttacccgtgacaggtttctccaccagtttatcttccagtgtcacaactttctgatacaccgccgctgtggcgttgtagttcctgtcgagtattgttttcattccccatccgagcacacagaacataaccagaaaagccactga

SEQ ID NO: 4844 - protein, 74 aa, Shigella sonnei
MKTVNGTRNPFAGREALDKRSASVFPALTRDRFLHQFIFQCHNFLIHRRCGVVVPVEYCFHSPSEHTEHNQKSH

SEQ ID NO: 4845 - DNA, 144 bp, Shigella sonnei
atgacactgacgttacttaccgcgtataacgcaccctatctggcagccctgacacgtccactggtcatgcctgccccggaaaaggttccggatgtcagcgaaccggtaaccgctccggataactcagaaccacaacaggtttaa

SEQ ID NO: 4846 - protein, 47 aa, Shigella sonnei
MTLTLLTAYNAPYLAALTRPLVMPAPEKVPDVSEPVTAPDNSEPQQV

SEQ ID NO: 4847 - DNA, 216 bp, Citrobacter rodentium
atgactgttcaggactacttattaaaatttcgcaaaatcagttcactcgaaagtctggaaaaactctacgaccatcttaattacaccctgacggacgatcaggaactgaccaatatgtatcgtgctgccgatcaccgtcgcgcagagctggtttctggcgggcgtttgtttgacctcggccaggtaccgaagtccgtctggcactatgtccaataa

SEQ ID NO: 4848 - protein, 71 aa, Citrobacter rodentium
MTVQDYLLKFRKISSLESLEKLYDHLNYTLTDDQELTNMYRAADHRRAELVSGGRLFDLGQVPKSVWHYVQ

SEQ ID NO: 4849 - DNA, 1134 bp, Shigella sonnei
atgaccaaggcagattttggtgtaactattgatgatactttaataactgattttcgagatgtggttaatgaaggggagtttgcttacagctacttcataaacagaaatggtaaaaaccagttcagccctatctgttcgtgcatggattggataagcgtttctgttcgcaatctgatgaacttccctgagctgtcggaagatattgatgtcaaggccatgcaggtttactcccttatatcatctattgatattgctgtggaggcgttgcagcagcttcaccgcatcattgagagtgatgataagttagcgaggtggcctttcaagaaatcaacgaatgtctttaagaataaaacgccctatctttcacatgaggatgatgacgcatactttaagagtattcgagctatctttggtgctcaccctacaaatcttaaaaatagtgatggtgagcgactgtttgcaagctggcctcattttcatgctttcaatgaaaatgatttcactataagcctttacaacaacacgccagggaaagatgatgttattttcggcattaaattcgatgagctaattacatatattgaagataggtataaatatctaacaagcctaaagggttccgtaatagcaatccgtataaaacattacagcaccctatccaaacagattataccgtctactgataacattcatgctgagttaaagttgcttctttcagaagttgcggtgcgaggtgataacgattattaccgaatggaagtggaagagttaataaagttgttcgaggggaatgttaaagaggcacatctcaaggatgaagctgacgtatttttaagtaaactacatccaattgcagtagagattagatataatcttcaggaaatgaatattgaggatttagcaactaagcatggcgtgttgatttcaacacttccgaaaaatgccctgcattacgttcttcagaaaatgtttacttggctccactctgatagatatgacccaatgggtggcttttacttggacaagttaaatgaatattcaggcgggcgatacaatttttgttctgaggatgatgacagtacaactctattgaagctccggatgatgttgcattggtatcatcaacaaaaatag

SEQ ID NO: 4850 - protein, 377 aa, Shigella sonnei
MTKADFGVTIDDTLITDFRDVVNEGEFAYSYFINRNGKNQFSPICSCMDWISVSVRNLMNFPELSEDIDVKAMQVYSLISSIDIAVEALQQLHRIIESDDKLARWPFKKSTNVFKNKTPYLSHEDDDAYFKSIRAIFGAHPTNLKNSDGERLFASWPHFHAFNENDFTISLYNNTPGKDDVIFGIKFDELITYIEDRYKYLTSLKGSVIAIRIKHYSTLSKQIIPSTDNIHAELKLLLSEVAVRGDNDYYRMEVEELIKLFEGNVKEAHLKDEADVFLSKLHPIAVEIRYNLQEMNIEDLATKHGVLISTLPKNALHYVLQKMFTWLHSDRYDPMGGFYLDKLNEYSGGRYNFCSEDDDSTTLLKLRMMLHWYHQQK

SEQ ID NO: 4851 - DNA, 726 bp, Shigella sonnei
atgaaaatattcaattcaagttttatagcaaacatatcatctacaataagaacccacctcccgatactacaaaaaaatataagaccacatccatcaccaaacctcgacgtaacaagtcatcatcgtgtattccagaaagacggaataggattgagccaaacaggaaaatcaacacaacttgttattatgtcgcacggtggatggaaagagatctcccatccacaaacactattcacgcgtcaaaaaggcgatggatggactgttgtaccccaaaacctaaggcttgacttttatactaaagataacgacttcacaaagggactaagcgttctttcagaggtaaacaaacgccatactgaagcacaaacagggttaacactatcactaaacataagccaagatgacctaagttttctggcaaacgcgcgcaatatacctcaatcaaaactagaagaagaaatgaaatcacaagctatatatagaaaagaatacgcaataagtaatgagaagataaaaaactatgctttatattatcatgaccaagccaaaaacattatacaaaaacatcaagatggttcgggaaatcaaaacgtcgatatagcatttataactgataaaaatcataaaaaacacctttctgacatatttaaagtaataaatgaatcaggagtaaaatatgatgtgattcactttggcgcttgccgagtaaatagagaggagcaataa

SEQ ID NO: 4852 - protein, 241 aa, Shigella sonnei
MKIFNSSFIANISSTIRTHLPILQKNIRPHPSPNLDVTSHHRVFQKDGIGLSQTGKSTQLVIMSHGGWKEISHPQTLFTRQKGDGWTVVPQNLRLDFYTKDNDFTKGLSVLSEVNKRHTEAQTGLTLSLNISQDDLSFLANARNIPQSKLEEEMKSQAIYRKEYAISNEKIKNYALYYHDQAKNIIQKHQDGSGNQNVDIAFITDKNHKKHLSDIFKVINESGVKYDVIHFGACRVNREEQ

SEQ ID NO: 4853 - DNA, 747 bp, Citrobacter freundii
atgaatcatctttacgaacaactgaccgcacttaaactcaccggcttccgtgatgcgcttaaaaagcaacttgctcagccgggcacataccaggagctgggcttcgaagaacgcctgtcattactgacagcagaagaactaacctgccgtgaaaacaggaaggcagagcgtctgatcaaacatgcacggttcagacttaatgctgagttatcaaagctggattatcgtaacaatagagggctggacagggccctcatccgttcactcagtcagggaaactggttaaccctgaaacaaaatattttactgaccggggccaccggcagcggtaaaacgttcctggcatgtgcacttggtcataatgcctgccgacagggatacaaggtctactattatcgccttaaagcgctgatggaacagtgctatcaggggcatgctgatggaagatacagcaaacttttgaccaggctgaataatagcgatctgctgcttctggatgactgggggctggaacctctctcatcagaacagcgtagcgacctgctggaaatagtggatctgatgtaccaacgaggctcaatcatcgtagtgagccagttgccggtggaaaactggtacaaaatgatcggagactccacacatgcggatgccatcctagatcgactggttcatggcagtatcaagatcgaacttaaaggagaatcaatgcggaaaatacaatctccgttgaccgaaggagatcagtga

SEQ ID NO: 4854 - protein, 248 aa, Citrobacter freundii
MNHLYEQLTALKLTGFRDALKKQLAQPGTYQELGFEERLSLLTAEELTCRENRKAERLIKHARFRLNAELSKLDYRNNRGLDRALIRSLSQGNWLTLKQNILLTGATGSGKTFLACALGHNACRQGYKVYYYRLKALMEQCYQGHADGRYSKLLTRLNNSDLLLLDDWGLEPLSSEQRSDLLEIVDLMYQRGSIIVVSQLPVENWYKMIGDSTHADAILDRLVHGSIKIELKGESMRKIQSPLTEGDQ

SEQ ID NO: 4855 - DNA, 321 bp, Citrobacter koseri
atgttgttgtttttcacaaacaacgtcagcttatcgcctggttgcagattcgcagtgtcgctgttccagcgcatcacatctttgatgttcacgccgtggcgtttagcaatgcttgaaagcgaatcgcctttgcgcacacgatacgtaatgctatcgctgttgtttgccaaccgctgtgcgctactgcctgcaccaatcgtcaaactttggcctggctacagcttagatccgcgcagtttgttccactgctgcaaatctttggtgcttacgccgagacgtgaagcgatgcttgaaagcgtgtcgccagagcgtacggtgtaa

SEQ ID NO: 4856 - protein, 106 aa, Citrobacter koseri
MLLFFTNNVSLSPGCRFAVSLFQRITSLMFTPWRLAMLESESPLRTRYVMLSLLFANRCALLPAPIVKLWPGYSLDPRSLFHCCKSLVLTPRREAMLESVSPERTV

SEQ ID NO: 4857 - DNA, 753 bp, Shigella sonnei
atgcgtttttctcctgatgtttctttatgcttaacggaacttgtgacgttgaataataaggtccctcagggtgggtgctgttctagttatattgcaaatcttttattttttaatagtgagtataatctctataatagattgaagtctatgggactttcatattcaaggcttttagatgatattactatatcctctgataaggatctttcatcagaggaaaaaacaaaagtaataaaactcgttcacggaatggtgaatcagtacagactttcaataaatgaaagtaagacaacgatagagcactcaaaagattcgtcttctaaacttagtgtcactgggttgtgggtaaagcatggtgttcctaagttaacaaaagaaaatagacgttatatcaggtacttagtttatatatgtaaaaaacaaggtgcttatgaacgtcatacgaaagagtaccatgatttatggaatagatgctctggcaaggttgctcaaatgtcgaggcttgggcatgtccaggcggttgaattgagggcgattctttctgagataatgccagtttatgatgattacaagatatctaaattaaagttgatggctaagcactatctaaataagtttacgccgcctttaactgatgatcagattaggaaaatagataggatgctctatgattttgatatagtagggcggactaataagaatcttgcaaaactatatagacgtaagctcgtggcattacttccagataggtga

SEQ ID NO: 4858 - protein, 250 aa, Shigella sonnei
MRFSPDVSLCLTELVTLNNKVPQGGCCSSYIANLLFFNSEYNLYNRLKSMGLSYSRLLDDITISSDKDLSSEEKTKVIKLVHGMVNQYRLSINESKTTIEHSKDSSSKLSVTGLWVKHGVPKLTKENRRYIRYLVYICKKQGAYERHTKEYHDLWNRCSGKVAQMSRLGHVQAVELRAILSEIMPVYDDYKISKLKLMAKHYLNKFTPPLTDDQIRKIDRMLYDFDIVGRTNKNLAKLYRRKLVALLPDR

SEQ ID NO: 4859 - DNA, 204 bp, Shigella sonnei
atggaaaatggatttgttaatttttatgaccatgttaaagggtatggctttataaggcgtgagcgtggacgtgatgttttctttcggtatgatgattttttgtttttagggcatgatgtcgatatatgtaaaggtattttagttaggtttaaattagaaaaaacagataaagggtttaaagctgtagcgattcaaaaggtataa

SEQ ID NO: 4860 - protein, 67 aa, Shigella sonnei
MENGFVNFYDHVKGYGFIRRERGRDVFFRYDDFLFLGHDVDICKGILVRFKLEKTDKGFKAVAIQKV

SEQ ID NO: 4861 - DNA, 171 bp, Shigella sonnei
atgtctaaagccccaattggtacaacagcttcaaccggacaaaaatgccctgaaagcggtgtttggaaagtggtaggaacgccttcaactacagcaccaattgccaaaggcaatgtaatgcctccgtataacggaaaagccgtaacttggaaattaacccaatacgcttga

SEQ ID NO: 4862 - protein, 56 aa, Shigella sonnei
MSKAPIGTTASTGQKCPESGVWKVVGTPSTTAPIAKGNVMPPYNGKAVTWKLTQYA

SEQ ID NO: 4863 - DNA, 237 bp, Citrobacter koseri
atgtgtccggtcgttccagtccctgacctttccgccgaacccagcaggtccgacagccctcgtggtcagcatgatgtgcgcatggggatttgttttatccatgtgatggaacgccacatcagcaatcatgccctgactgacaaagttttctctgacaaaggcgagaacggtttcccgtgcggcatcctgcggcagttcacgggggatagcgagttcaatttcccgcgcaagttgtga

SEQ ID NO: 4864 - protein, 78 aa, Citrobacter koseri
MCPVVPVPDLSAEPSRSDSPRGQHDVRMGICFIHVMERHISNHALTDKVFSDKGENGFPCGILRQFTGDSEFNFPRKL

SEQ ID NO: 4865 - DNA, 234 bp, Shigella sonnei
atgaacaaatccgatgaaatgattcaggaactacccgatggggcattcacccgcgagtgtgctgaaaccgttgttacacagtaccggaatgtctttatcgaggatgatcagggaacgcattttcgcctggttgtccgtcaggatggcacgttgatctggcgctcctggaattttgaggactgtgccgggtactggatgaaccggtacatcagggatttcggcattcgtaagtaa

SEQ ID NO: 4866 - protein, 77 aa, Shigella sonnei
MNKSDEMIQELPDGAFTRECAETVVTQYRNVFIEDDQGTHFRLVVRQDGTLIWRSWNFEDCAGYWMNRYIRDFGIRK

SEQ ID NO: 4867 - DNA, 168 bp, Citrobacter koseri
atgatgctaagcgaggaaacgtccgccgtacgcccacaaaaacaaacgcgatttaacggtgcaaaactggtatggatggaaaggcagtccgctcaccgtgaccggcgcagtcatcattgtattaatgctattgatgatgattttttcaccgtggcttgcgacgcatga

SEQ ID NO: 4868 - protein, 55 aa, Citrobacter koseri
MMLSEETSAVRPQKQTRFNGAKLVWMERQSAHRDRRSHHCINAIDDDFFTVACDA

SEQ ID NO: 4869 - DNA, 513 bp, Shigella sonnei
atgccaggacaaccaataccaagtgagctcaaagagaaaggactgatatggcttttaccaccatactgctggtcacatcgtcagatagcccgtaagctgaagatcagtgcctcagttgtatcaaaatggaaatgtgagttagtggagcaaggacttttacctgaaaatgaaaagattacctccgttgatgttgaagactggacaccggagcgtcgattctcagttgttcttgagacggctacgctgtcagaaatggaacttgctgattattgccgacgcacgggattgtttgttgaacaggttaaagaatggcgggctatctcaattcaggcgcatgaaaagaaattgacggaaaatatccgaacagacagggcattgcgtgacgcaaaaaataagttacgagaactggagaaagagcttaagcgcaaagataaagctctggcggaagcagctgccctgcttatattaagggaaaagttcaatgccctctgggacaacagcgaggaagactga

SEQ ID NO: 4870 - protein, 170 aa, Shigella sonnei
MPGQPIPSELKEKGLIWLLPPYCWSHRQIARKLKISASVVSKWKCELVEQGLLPENEKITSVDVEDWTPERRFSVVLETATLSEMELADYCRRTGLFVEQVKEWRAISIQAHEKKLTENIRTDRALRDAKNKLRELEKELKRKDKALAEAAALLILREKFNALWDNSEED

SEQ ID NO: 4871 - DNA, 336 bp, Citrobacter pasteurii
gtgctgtttggattttcgcgtatccagtgccgccacatcccgggatttcagcgagacgtcttccccgacggcctcccggatagtgtgcgagcgtccggaaaagacctccaccggtacgcccggcatttcccacataccgtgcttaccgaccacttcagtttcatagcccagcgcctcaacctgctctttcagtttttcccggtagagcctgccaaaggcaatctgattagcgtacacattctcaatgaaccccgttttccccactttgtcactgctcagtgtcttccattcgccgttatgctgcgtaacattagtcaccaccgcatgcgtgtgtaa

SEQ ID NO: 4872 - protein, 111 aa, Citrobacter pasteurii
MLFGFSRIQCRHIPGFQRDVFPDGLPDSVRASGKDLHRYARHFPHTVLTDHFSFIAQRLNLLFQFFPVEPAKGNLISVHILNEPRFPHFVTAQCLPFAVMLRNISHHRMRV

SEQ ID NO: 4873 - DNA, 207 bp, Shigella sonnei
atgttccccgtggtcatcctcgataaagacgttccggtactgtacggcaacggcttcggcatgtttgcgggtaaaggagccgtcaggcagcccctgaagtattctgaaatattcgctcatcctcatctctccggtgatgccccgcacagggcggggcggttgtcacagtcagtcgttcagaacgggatatcgtctgaaaacccgtaa

SEQ ID NO: 4874 - protein, 68 aa, Shigella sonnei
MFPVVILDKDVPVLYGNGFGMFAGKGAVRQPLKYSEIFAHPHLSGDAPHRAGRLSQSVVQNGISSENP

SEQ ID NO: 4875 - DNA, 207 bp, Shigella boydii
atggataccttacccaaatccggctatatgcgcccggcacaggtgataaaccattttcagattagcgaatcaacgctatggaactgggttaaaaaaggtaaattccccagcccggataagctgggcgatggcgtaagccgctttgatgtttccgctatccgtaagtggcttgcagaccgcaaagacacaaccagcacgcgtaattaa

SEQ ID NO: 4876 - protein, 68 aa, Shigella boydii
MDTLPKSGYMRPAQVINHFQISESTLWNWVKKGKFPSPDKLGDGVSRFDVSAIRKWLADRKDTTSTRN

SEQ ID NO: 4877 - DNA, 837 bp, Shigella boydii
atgaaaatgccaaaaaggcccgcaacagggtcggggcgttctcacgcccaaaacaaccagacacccatttcatcaggtgaacttgccgacctgattcctgttatttcggggcaaattggccgccatcaaactaacgctgtaagtgcacgtgcgctacatgctgcgctgaatatcgggaaggatttttcgacatggataaccaacagaataagtgaatatggttttgttattggcaatgattacgccgtgcataaaatgatttccccaaaaatggggaaaagcccgaatgatgtggcctgtagccatatttcacgtactggacgccccggcaaagattatttactcacactgaacaccgccaaagaaatagcaatggtggaacgtaacgaccgtggccgggccattcgttgttatttcatccgttgcgaagaagaactggcacacgtagggccgcaatccatacagaaaattcgccaccagctaaaaagccggataatggcagccagttatcacagtcccatgtgcgccgcactggctttacagcgtgccgctgccgggaaaccctcctaccctcataactacgcaacagaggccaatatgatagcccggcttgtactggatggaatgacagccagacagtgggctgcggccaaaggtttaaccggagatccacgcgagcacatgagtagcgaacagcctgaactcatggcctaccttgagcaaagcaacacaaccctgattgatacggggatggactaccacaagcgcaaaacgcatcttgcccggcttattcctcaatggcgaatgagacaacagaggaacaccagccatgcgtaa

SEQ ID NO: 4878 - protein, 278 aa, Shigella boydii
MKMPKRPATGSGRSHAQNNQTPISSGELADLIPVISGQIGRHQTNAVSARALHAALNIGKDFSTWITNRISEYGFVIGNDYAVHKMISPKMGKSPNDVACSHISRTGRPGKDYLLTLNTAKEIAMVERNDRGRAIRCYFIRCEEELAHVGPQSIQKIRHQLKSRIMAASYHSPMCAALALQRAAAGKPSYPHNYATEANMIARLVLDGMTARQWAAAKGLTGDPREHMSSEQPELMAYLEQSNTTLIDTGMDYHKRKTHLARLIPQWRMRQQRNTSHA

SEQ ID NO: 4879 - DNA, 567 bp, Klebsiella michiganensis
atgggcaacactaagttggctaatccggctccgctgggcctgatgggttttggcatgaccaccattctgctgaacctgcacaatatcgggatgttcccgatggacggcattatcctggcgatgggcattttttacggcggtatcgcacagatctttgcgggcctgctggaatataagaaaggcaacaccttcggcttaaccgcctttacctcttacggttccttctggctgactctggtcgcaattttgttgatgcctaaaatgggcctggcagaggcggcaaacgcccatttcctgggcgtgtacctgggactgtggggcgtgttcaccctgttcatgttcttcggtacccttaaggcgaaccgcgcactgcaattcgtcttcctgagcctgaccgtactgttcgctctgctggccatcggtcacctggcggataacgaaggcatcgttcacgttgccggctgggtaggtctggtttgcggcgcaagcgcaatctacctggccatgggtgaagtgctgaacgagcagttcgaccgcaccattctacctattggtgaaaaacactga

SEQ ID NO: 4880 - protein, 188 aa, Klebsiella michiganensis
MGNTKLANPAPLGLMGFGMTTILLNLHNIGMFPMDGIILAMGIFYGGIAQIFAGLLEYKKGNTFGLTAFTSYGSFWLTLVAILLMPKMGLAEAANAHFLGVYLGLWGVFTLFMFFGTLKANRALQFVFLSLTVLFALLAIGHLADNEGIVHVAGWVGLVCGASAIYLAMGEVLNEQFDRTILPIGEKH

SEQ ID NO: 4881 - DNA, 1005 bp, Escherichia coli
atgaccattaacctgaaaaaccgcaacttcctgaaactgctggactacaccccggcggagatccagtacctgatcgatctcgccatcgagctgaaggccgccaaaaaagccggacgcgaaaaacaaaccctggtcgggaaaaacatcgccctgatctttgaaaaaacctccacccgcacccgctgcgccttcgaagtgggtgcgttcgaccagggcgcgcaggtcacctacctcggcccaagcggttcgcagattggccacaaagagtcgatgaaggacaccgcgcgcgtgctgggccgcatgtatgacggcatcgagtatcgcggctacggccaggccatcgttgaagagctgggcgagtacgcgggcgtgccggtgtggaacggcctgaccgacgagttccaccccacccaaattctcgccgacctgatgaccatgctggagcactctccgggcaaaaccctgccggagctgagctttgcttacctgggcgatgcgcggaacaacatgggtaattcgctaatggtcggcgcggccaaaatggggatggatatccgcctggttgcaccgaaatccttctggccggaggcgggcctggttgagcagtgccgcgccatcgccaaagagaccggcgcgcgcatcaccctcaccgacgacgtggaggaaggcgtgcagggcaccgatttcctctacaccgacgtgtgggtttccatgggtgagccgaaggaggcctgggccgagcgcgtcagcctgatgaagccatatcagattaacgcggacgtgatgaaggccaccggtaacccgaacgtcaagttcatgcactgcctgccggcgttccacaacgagcacaccaaagtgggccgcgaaatcgaaatggcgtacggcctgaaggggctggaagtgacggaagaggtcttcgaatcaccgaactccatcgtcttcgacgaagcagagaaccgcatgcacaccattaaagcggtcatggtggcgacactcggcgactaa

SEQ ID NO: 4882 - protein, 334 aa, Escherichia coli
MTINLKNRNFLKLLDYTPAEIQYLIDLAIELKAAKKAGREKQTLVGKNIALIFEKTSTRTRCAFEVGAFDQGAQVTYLGPSGSQIGHKESMKDTARVLGRMYDGIEYRGYGQAIVEELGEYAGVPVWNGLTDEFHPTQILADLMTMLEHSPGKTLPELSFAYLGDARNNMGNSLMVGAAKMGMDIRLVAPKSFWPEAGLVEQCRAIAKETGARITLTDDVEEGVQGTDFLYTDVWVSMGEPKEAWAERVSLMKPYQINADVMKATGNPNVKFMHCLPAFHNEHTKVGREIEMAYGLKGLEVTEEVFESPNSIVFDEAENRMHTIKAVMVATLGD

SEQ ID NO: 4883 - DNA, 198 bp, Escherichia coli
atgaactccacgatctggctcgcactggcccttgttttggtgctggaaggcctcggcccgatgctctatccgcgcgcatggcgccggatgatcgcgacaatgagccaactcccggacaatattttgcgtcgttttggcggtggtcttgtggttgccggtatcgttatctactacatgttgaggaaaacgattggctga

SEQ ID NO: 4884 - protein, 65 aa, Escherichia coli
MNSTIWLALALVLVLEGLGPMLYPRAWRRMIATMSQLPDNILRRFGGGLVVAGIVIYYMLRKTIG

SEQ ID NO: 4885 - DNA, 951 bp, Enterobacter cloacae
gtgaatttccagcaacttaaaattattcgtgaggcggccaggcgggattacaacctgaccgaagtcgccaatatgctttacacctctcagtcgggcgtcagccgacatatccgcgagctggaggaggagttaggcattgagatttttatccgtcgcggcaagcgcctgctgggtatgaccgagccaggcaaggcattgctgaccatcgctgagcgcattctcaacgaggccagcaacgttcgtcggctggcggatctctttaccaacgacgcttccggtgtgctgactatcgccaccacccatacacaggcgcgttacagccttccgacggttatcaaagcatttcgtgagatcttcccggacgtacgtctcgaactgatccagggcacgccgcaggaaattgaagtgctgctgcataacggtggggccgatatcggtatcgccagtgaacggctgagcaatgacccgctgctggtggcgttcccgtggttccgctggcaccacagcctgctattacccgccgaacacccgctgaaccaggtttcaccgttgacgctggaagagatcgtcaaatggccgcttatcacctaccggcagggcattaccgggcgttcgcgcatagatgaagcgttcaagcgtaaagggctcacgccggacgtggtgctgagcgcgcaggattccgacgtgatcaaaacctacgtcgagttagggctggggattggcctggtggccgagcagtctggcggagaatatgaggctggtaatctggtgcgtctggatacacgtcatctgttcgatgcgaacaccgtctggctcgggctaaagcgcggacagcttcagcgtaactatgtgtggcgttttatcgagctgtgcaatgcggggctctccgtagatgagatcaaacgccaggtgatggagccggaagaggtggcgattgattatcagatttaa

SEQ ID NO: 4886 - protein, 316 aa, Enterobacter cloacae
MNFQQLKIIREAARRDYNLTEVANMLYTSQSGVSRHIRELEEELGIEIFIRRGKRLLGMTEPGKALLTIAERILNEASNVRRLADLFTNDASGVLTIATTHTQARYSLPTVIKAFREIFPDVRLELIQGTPQEIEVLLHNGGADIGIASERLSNDPLLVAFPWFRWHHSLLLPAEHPLNQVSPLTLEEIVKWPLITYRQGITGRSRIDEAFKRKGLTPDVVLSAQDSDVIKTYVELGLGIGLVAEQSGGEYEAGNLVRLDTRHLFDANTVWLGLKRGQLQRNYVWRFIELCNAGLSVDEIKRQVMEPEEVAIDYQI

SEQ ID NO: 4887 - DNA, 2190 bp, Enterobacter cloacae
atgaaacgttctcatctttgggttttaaatccgtgcttgcttgccatgctttctacctctgcgtgggcggaagaacaaaaggaagaagatattgtggtctccgccagccgggcacatcgcagcgtggcagagatggcgcaaaccacctgggttattgagcgggcggaaattgagcagcaggttcagggcgggaaagagattaaagacgtgctggcccagttgatccccggcatggacgtcagcagccagggacgtaccaactacggcatgaacctgcgcggtcgctccatgatggtgatggtggacggcgtacgtctgaactcttcccgcagcgacagccgccagctcgactctatcgatccgttcaacattgaccgtatcgaagtcatttccggcgccacctcgctgtacggcggcggcagtaccggcgggctggtgaacatcgtcaccaaaaaaggccagccggagaccgaggtggagttccagaccggggcaaaaagcgggtttaacagccataacgaccatgatgagaacgtctccgcagccgtgagcggcggcaatgacaacgcctctggccgtctgtcggtctcctatcagcgctacggcggctggtatgacggcaacggcgacgaggtgattatcgataacacccagaccggcttgcagtattccgaccgtatcgacgtgatggggacaggcaccatcaacatcgacgatcatcagcagctccagttaaccacgcagtactacaagagcgaatccgacggcaagcacggcctgttccttggggagaatttcgctgcggtcacgggcgatgccaaagcctataacaaagataacctgaactctgaccgtatcccgggcacagagcgtcacctgatcaacctgcaatactcgaacaccgatttctggggtcaggatctggttgcgcagatttactaccgtgacgagagcctgacctactacccgttcccgacgctgagcaaaggcgcggtgaccagcattggcgcatcccagcagaaaaccgatttttacggcggcaagctgacgctgaacagcaagccgatagacgacctgaccctcacctggggtgtggatgccgaccacgaaacgttcgatgccaaccagcagttctttgacttgagcaaagcggcggcgagcggcggcatggagctggacaatgcctacaacgtgggccgttatccgggttacagcattaccaacctcgcgccgttcctgcaagccagctatgacattgacgccatcaccctcagcggcggcgtgcgttaccagtacaccgaaaacaaggtggacgattttgtcggctacgcccagcagcaggcaatcgccacgggcaaagcgacctccgctgacgcggtgccgggcgggaaaaccgactacaacaacttcctgtttaacgccgggatccttggacgtcttaccgaacagcagcagctgtggtttaacttctcccagggcttcgagatcccggacctggcgaagtactacggctccggcacctatcagctggtcgatggtcactatcgcctgcaaaacagcgtcaacgtgaacgactcaacgctgaacggtattaaggtcaatgcctacgagctgggctggcgcttcaccggcgataacctgcgtacccaggtggcggcgtactactcgctctcggataaaaccatcaccatcaacaaaagcgacatgaccatcaacctggaggacgacaaacgtcgtatctatggggttgaaggccaggtggactatttcttcaccgacagcgactggagcaccggggcgaactttaacgccatcaagtccgaaacgcgtgaaaacgggaaatgggagaagctgacggtcgacagcgccagcccgtctaaagccagcgcatgggttaactgggcgccgggcgactgggccctgcgcgtgcagagcacacaaaccttcgacgtgtctgacgccgacggtaagaagattgatggctataacaccgttgatttcctgggcagctacgccctgccggtgggcaaagtcagcttcagcgtggaaaacctgctggacaaagactacaccaccgcctggggccagcgcgcaccggggctgtatagcccaacctatggctcaccgggtctttatacttataaaggccgtggacgtacgtttggcctgaactactccgttctgttctga

SEQ ID NO: 4888 - protein, 729 aa, Enterobacter cloacae
MKRSHLWVLNPCLLAMLSTSAWAEEQKEEDIVVSASRAHRSVAEMAQTTWVIERAEIEQQVQGGKEIKDVLAQLIPGMDVSSQGRTNYGMNLRGRSMMVMVDGVRLNSSRSDSRQLDSIDPFNIDRIEVISGATSLYGGGSTGGLVNIVTKKGQPETEVEFQTGAKSGFNSHNDHDENVSAAVSGGNDNASGRLSVSYQRYGGWYDGNGDEVIIDNTQTGLQYSDRIDVMGTGTINIDDHQQLQLTTQYYKSESDGKHGLFLGENFAAVTGDAKAYNKDNLNSDRIPGTERHLINLQYSNTDFWGQDLVAQIYYRDESLTYYPFPTLSKGAVTSIGASQQKTDFYGGKLTLNSKPIDDLTLTWGVDADHETFDANQQFFDLSKAAASGGMELDNAYNVGRYPGYSITNLAPFLQASYDIDAITLSGGVRYQYTENKVDDFVGYAQQQAIATGKATSADAVPGGKTDYNNFLFNAGILGRLTEQQQLWFNFSQGFEIPDLAKYYGSGTYQLVDGHYRLQNSVNVNDSTLNGIKVNAYELGWRFTGDNLRTQVAAYYSLSDKTITINKSDMTINLEDDKRRIYGVEGQVDYFFTDSDWSTGANFNAIKSETRENGKWEKLTVDSASPSKASAWVNWAPGDWALRVQSTQTFDVSDADGKKIDGYNTVDFLGSYALPVGKVSFSVENLLDKDYTTAWGQRAPGLYSPTYGSPGLYTYKGRGRTFGLNYSVLF

SEQ ID NO: 4889 - DNA, 1326 bp, Enterobacter cloacae
atgaaaacctatgatttcatcggcattggtatcggtccgttcaacctcagtattgccgcgctggcagaggggctggacggttttagctcgctgtttcttgaacgcaagccgcacttctcctggcacccggggatgatggtgccggactgccatatgcagaccagcttcctgaaggatctggtgagcgccgtggagcctaccaaccgccacagctttctgaactatctggtacagcgcaaaaagttctaccgtttcctcaccaccgagcagcgcaccgtgtcgcgcgaggagtttgccgactacctgtgctgggcggcggataacctcactaacctggccttcagccagcaggtacagcaggtcagctttgatgagcaaaacggcctgtttgaggtcgtgacccagcgggatcgcttcctggcgcgccacgtctgcgtggggattgggaagcagatcaatctcccagactgcgtcaccgcgcaggacgacacctgcttccacgccagcgaaatgatgctgcgcacgccggatttagcgggcaagcgcgtcaccgtcgtcggcggcggccagagcggtgcggatctgtttttaaatatcttccgtggggagtgggggcagccgctgagcctcaactgggtgtcgcgccgcaacaactacaacgcgctggatgaagccgcgtttgccaatgagtatttcacgccggagtacgtggacagcttctcgacccttggtgacgacgcccgacgtcagatgttgcaggagcagaagatgacctccgacgggatcaccacggagtcgctgctggccatctatcgcgccatgtatcaccgcttcgaagtgctgcgcgaaaaaccctgggcgcatctgatgccgtcccgctcggtgacggcgctgacgcgccaggaaaccggacatcgcctcagcatccagcatcacctggacggcgggcgcgaacagctggagagcgacgtggtgattttcgccaccggctaccgcgccgtgcagcccgcgtttctcgccccgctctcttcccgactgcgtctggatgaggatgaagccttctgcatcaacaacgatttcacccttgaatgggacggcccgcagagcaaccgcctgtttgccgtcaatgccgggatgcaccgtctcggtattgccgaaccccagctcagcctgatggcctggcgcgcggcgcgaattttgaatcgcgctcacgatgacgagccgtttgagctggcaaccacccccggcgtgatccactggcggagcaccaccagcccggagagcagccaggtttttaaatcattaatgaagaccaccgagtactga

SEQ ID NO: 4890 - protein, 441 aa, Enterobacter cloacae
MKTYDFIGIGIGPFNLSIAALAEGLDGFSSLFLERKPHFSWHPGMMVPDCHMQTSFLKDLVSAVEPTNRHSFLNYLVQRKKFYRFLTTEQRTVSREEFADYLCWAADNLTNLAFSQQVQQVSFDEQNGLFEVVTQRDRFLARHVCVGIGKQINLPDCVTAQDDTCFHASEMMLRTPDLAGKRVTVVGGGQSGADLFLNIFRGEWGQPLSLNWVSRRNNYNALDEAAFANEYFTPEYVDSFSTLGDDARRQMLQEQKMTSDGITTESLLAIYRAMYHRFEVLREKPWAHLMPSRSVTALTRQETGHRLSIQHHLDGGREQLESDVVIFATGYRAVQPAFLAPLSSRLRLDEDEAFCINNDFTLEWDGPQSNRLFAVNAGMHRLGIAEPQLSLMAWRAARILNRAHDDEPFELATTPGVIHWRSTTSPESSQVFKSLMKTTEY

SEQ ID NO: 4891 - DNA, 1371 bp, Serratia marcescens
atgaccgctcgccttacgcgctggcttaacacgctcgataattttgaaacgaagatggcgcagctgccatccgttcgtcgttatggacgcctgacgcgcgccaccggtctggtcctggaagccactgggctgcaacttccgctcggcgccacctgcgtgattgagcgtcaggacgggggggagacgcgtgaagtggaaagcgaagtggtcgggttcaacggtcagcgcctgtttctgatgccccttgaagaagtggaagggattttgcccggcgcccgcgtctacgcgaaaaacatcagcggtgacggcctgcaaagcggcaaacagctcccgctcggtccggcgctgctgggccgcgtgctggacggaagcggcaaaccgctcgatggcctgccctcccctgataccaccgaaaccggcgcgctgatcacccaacccttcaacccgctgcaacgcacgccaatcgagcacgtactggataccggcgtgcggccgattaacgccctgctcaccgtgggacgcggccagcgtatggggctgtttgccggctccggcgtgggtaaatcggtcctgctcggcatgatggcgcgttatacccaggcggacgttatcgtggttggcctgattggtgagcgtggtcgcgaagtcaaagatttcatcgaaaacattctgggtgcggagggccgcgcccgctcggtggtgatcgccgcgcctgcggacgtgtcgccgctactgcgtatgcagggtgccgcctacgccacgcgtattgcggaagatttccgcgaccggggccagcacgtgctgctgattatggactccctgacccgctacgcgatggcgcagcgtgagattgcgctggccatcggcgagccgcccgcgaccaaaggctacccgccgtcggtcttcgccaagctcccggcgttggttgagcgcgcggggaacggcatcagcggcggaggctccatcaccgcgttctatacggtactgaccgaaggcgatgaccagcaggacccgattgccgactccgcgcgagcgattctcgacggccatatcgtgctgtcgcgccgtctggccgaagccgggcactacccggcaattgatattgaagcctcgatcagccgtgcgatgacggccttgatcaccgagcaacactacgcccgcgtgcgtaacttcaaacaactgctctccagcttccagcgcaaccgcgatctggtgagcgtcggggcgtacgccaaaggcagcgacccgatgctcgataaagcgattgccctgtggccgcagctggaggcatttctgcaacagggtatttttgaacgcgccgactgggaagattccctccaggcactggagctgattttcccgcaggtgtaa

SEQ ID NO: 4892 - protein, 456 aa, Serratia marcescens
MTARLTRWLNTLDNFETKMAQLPSVRRYGRLTRATGLVLEATGLQLPLGATCVIERQDGGETREVESEVVGFNGQRLFLMPLEEVEGILPGARVYAKNISGDGLQSGKQLPLGPALLGRVLDGSGKPLDGLPSPDTTETGALITQPFNPLQRTPIEHVLDTGVRPINALLTVGRGQRMGLFAGSGVGKSVLLGMMARYTQADVIVVGLIGERGREVKDFIENILGAEGRARSVVIAAPADVSPLLRMQGAAYATRIAEDFRDRGQHVLLIMDSLTRYAMAQREIALAIGEPPATKGYPPSVFAKLPALVERAGNGISGGGSITAFYTVLTEGDDQQDPIADSARAILDGHIVLSRRLAEAGHYPAIDIEASISRAMTALITEQHYARVRNFKQLLSSFQRNRDLVSVGAYAKGSDPMLDKAIALWPQLEAFLQQGIFERADWEDSLQALELIFPQV

SEQ ID NO: 4893 - DNA, 1488 bp, Citrobacter freundii
atgcgcaacccaacacttttacaatgttttcactggtactaccccaccggcggtgaactgtggcgagaagtcacggcattagcccccaacctgaacgaaatcggcatcaatatggtctggttaccgccggcatacaaaggggcatccggcggctattccgtcgggtatgactcttatgaccttttcgacctcggtgagtttgaccagaaaggcagcttcgccaccaaatacggcgataaagcccagctgctggaggccatcaacgccttaaaaagcaaccagattgcggtgcttctggacgtggtggtcaaccataaaatgggggccgatgaaaaggaacccgtccgcgtgcagcgcgtggatgctcaggatcgcacccaaatcagcgatgagatcatcgaatgcgaagcctggacgcgttacaccttccccgttcgggccgggcagtattcgcaatttatctgggattacaaatgcttcagcggtatcgaccacattgaaaaccccaatgaggacggtatcttcaaaatcgtgaacgactacaccggcgaaggctggaacgatcaggtcgacgacgagatgggcaatttcgattacctgatgggtgaaaatatcgattttcgcaaccatgcggtgacggaggagatcaaatactgggcgcgctgggtgatggagcaaacccactgcgacggcttccgcctggacgcggtaaaacacatcccggcctggttctataaagagtggattgagcacgtccaggaggtggccccgcagccgctgtttattgtggcggaatactggtctcacgaagtggataaattgcagcactacatcaatcaggtggacggtaaaaccatgctgtttgatgcgccactgcaaatgaaatttcacgaagcctcacgccagggacgcgactacgatatgagccagattttcaccggtacgctggtggaagccgatccgttccatgccgtgacgctggttgccaaccacgatacccaacccttgcaggcgctggaagccccggttgaagcctggttcaaaccgctggcctacgcgctcatcctgctgcgtgaaaacggcgtgccgagcgtgttctacccggatctttttggcgccagctatgacgacaccggcggggatggcgagacgtatcacatcgatatgcctgtgattgaacagctccacgagctgatcctcgcccggcagcgttttgcccacggcgtgcagacgctgtttttcgatcatccaaactgcattgcgttcagccgcagcgggactgaggaacacccgggctgtgttgtggtgctgtcgaatggcgatgacggcgagaagacgatctgcctcggggagaattacggcaacaagacctggcgtgattttttaggcaaccgcgaggaaaccgtgaccacggcggcggatggcgaagggacgttcttctgtaacgggggaagcgtcagcgtctgggtgattgaggacgcgctgtag

SEQ ID NO: 4894 - protein, 495 aa, Citrobacter freundii
MRNPTLLQCFHWYYPTGGELWREVTALAPNLNEIGINMVWLPPAYKGASGGYSVGYDSYDLFDLGEFDQKGSFATKYGDKAQLLEAINALKSNQIAVLLDVVVNHKMGADEKEPVRVQRVDAQDRTQISDEIIECEAWTRYTFPVRAGQYSQFIWDYKCFSGIDHIENPNEDGIFKIVNDYTGEGWNDQVDDEMGNFDYLMGENIDFRNHAVTEEIKYWARWVMEQTHCDGFRLDAVKHIPAWFYKEWIEHVQEVAPQPLFIVAEYWSHEVDKLQHYINQVDGKTMLFDAPLQMKFHEASRQGRDYDMSQIFTGTLVEADPFHAVTLVANHDTQPLQALEAPVEAWFKPLAYALILLRENGVPSVFYPDLFGASYDDTGGDGETYHIDMPVIEQLHELILARQRFAHGVQTLFFDHPNCIAFSRSGTEEHPGCVVVLSNGDDGEKTICLGENYGNKTWRDFLGNREETVTTAADGEGTFFCNGGSVSVWVIEDAL

SEQ ID NO: 4895 - DNA, 720 bp, Enterobacter cloacae
gtgaattcactctataccgctgaaggtgtaatggataaacactcgctgtggcagcgttatgttccgctggtgcgtcacgaagcattgcgcctccaggtgcgtttgccggcgagcgtggaactggacgatctgctacaggcgggcggtatcgggttattgaatgcagttgaccggtacgacgctctgcaaggaacggcatttacgacttacgcagtgcagcgtattcgtggtgcgatgctggacgagctgcgcagccgcgactgggtgccgcgcagcgttcgccgcaacgcgcgcgaagtggcgcatgcgatggggcagctggaacaggaactggggcgcaacgcgacggaaaccgaagtggcggagcgtctgggcatccctgttgaagagtatcgccagatgttgctcgataccaataacagccaactcttctcctatgatgagtggcgcgaagagcatggcgatagcatcgagctggtgaccgatgaacaccagcaagaaaacccgttacaccatttactggaagggaatttacgccagcgcgtgatggaagcgattgaagctttaccggaacgtgagcaactggtgttaaccctctattaccaggaagagctcaatctcaaagagattggcgccgtgctggaggtgggcgagtcacgggtgagccagctgcacagccaggccattaaacgcctgcgcacaaaactgggtaagttatag

SEQ ID NO: 4896 - protein, 239 aa, Enterobacter cloacae
MNSLYTAEGVMDKHSLWQRYVPLVRHEALRLQVRLPASVELDDLLQAGGIGLLNAVDRYDALQGTAFTTYAVQRIRGAMLDELRSRDWVPRSVRRNAREVAHAMGQLEQELGRNATETEVAERLGIPVEEYRQMLLDTNNSQLFSYDEWREEHGDSIELVTDEHQQENPLHHLLEGNLRQRVMEAIEALPEREQLVLTLYYQEELNLKEIGAVLEVGESRVSQLHSQAIKRLRTKLGKL

SEQ ID NO: 4897 - DNA, 801 bp, Enterobacter cloacae
atgaaattagcacttctgggtcgtcaggcgctgatggggatgatggccgttgcgctggtcgcggggatgagtgtgaaaacgttcgcggcagagaatctgctcaacaaagttaaagagcgcggcacgctgctggttgggctggaaggaacctatcctccgttcagcttccagggcgacgacggtaaactgaccggttttgaagtggagtttgcgcaggagctggcgaaacacctcggcgttaaagcctccctgaaacccaccaaatgggacgggatgttggcgtcactggattccaaacgtattgacgtggtgattaaccaggtaaccatttctgacgagcgtaagaagaagtatgacttctccacgccgtacaccgtgtccggtattcaggcgctggtgaagaaaggtaacgaaggcagcatcaagtccgcagcggacctgaaaggtaagaaagtcggcgtcggtctgggcaccaactacgaagagtggctgcgccagaacgtgcagggcgtggacatccgtacctacgatgatgacccgacgaaataccaggatctacgcgtaggccgtattgacgccattctggttgaccgcctggcagcgctggatctggtgaagaaaaccaacaataccctggctgtcgcgggtgatgcgttctcccgtcaggagtccggcgtggcggtgcgtaaaggtaacgaggatctgctgaaagccatcgacggcgccattgctgagatgcagaaagacggcagcctgaaggcgctttctgagaagtggttcggcgcagacgtgacgaaataa

SEQ ID NO: 4898 - protein, 266 aa, Enterobacter cloacae
MKLALLGRQALMGMMAVALVAGMSVKTFAAENLLNKVKERGTLLVGLEGTYPPFSFQGDDGKLTGFEVEFAQELAKHLGVKASLKPTKWDGMLASLDSKRIDVVINQVTISDERKKKYDFSTPYTVSGIQALVKKGNEGSIKSAADLKGKKVGVGLGTNYEEWLRQNVQGVDIRTYDDDPTKYQDLRVGRIDAILVDRLAALDLVKKTNNTLAVAGDAFSRQESGVAVRKGNEDLLKAIDGAIAEMQKDGSLKALSEKWFGADVTK

SEQ ID NO: 4899 - DNA, 987 bp, Enterobacter cloacae
atgtcactacagaatttaacgcgctttccccgtctggaatttatcggcgcacccacgccgctggagtatctgccgcgattttctgactacctggggcgcgatatattcattaagcgtgacgatgtgacgcccatggcgatgggcggaaataagctgcgcaagctggagtttctcgccgccgatgctctgcgtgagggggcggacacgctgatcaccgccggggcaattcagtctaaccacgttcgccagacggcggcagtggcggcgaagctgggactccactgcgtagccctgctggagaacccgatcggcacgcaggcagagaattacctgactaacggtaaccgtttgctgctggatctgttcaacgtgcaggttgaaatggtcgacgcgttgaccgacccggctgcacagctcgacgagctggcgacgcgtctggaagcgcagggttttcgtccgtacgtgatcccggttggcggctcgaatgcgctgggtgccctcggctatgttgagagcgcgctggaaatcgctcagcagtgcgaaggcgcggtgagtttatcctcggtggtggtggcgtccggcagtgcggggacccatgctggtttagcggtcgggcttgagcaactgatgccggaggtcgagctgattggcgtgacggtttccagaagcgttgcggaacagaagccgaaagtcgtcaccctgcaacaggcggtggctgaacagcttgcgcttcaggcgaaggcggaaatactgctgtgggatgactatttcgcgccgggctatggcacccccaatgatgaagggatggaggcggttaagctgctggcccgtctcgaaggtattctgcttgacccggtctataccggcaaggcaatggcgggcctgatcgacggcatcgcccgcaagcgctttaaggatgaaggacccattttgtttgttcatactggcggggcgcctgcgctgtttgcctatcatcctcatgtctaa

SEQ ID NO: 4900 - protein, 328 aa, Enterobacter cloacae
MSLQNLTRFPRLEFIGAPTPLEYLPRFSDYLGRDIFIKRDDVTPMAMGGNKLRKLEFLAADALREGADTLITAGAIQSNHVRQTAAVAAKLGLHCVALLENPIGTQAENYLTNGNRLLLDLFNVQVEMVDALTDPAAQLDELATRLEAQGFRPYVIPVGGSNALGALGYVESALEIAQQCEGAVSLSSVVVASGSAGTHAGLAVGLEQLMPEVELIGVTVSRSVAEQKPKVVTLQQAVAEQLALQAKAEILLWDDYFAPGYGTPNDEGMEAVKLLARLEGILLDPVYTGKAMAGLIDGIARKRFKDEGPILFVHTGGAPALFAYHPHV

SEQ ID NO: 4901 - DNA, 705 bp, Enterobacter cloacae
atgcttcagtttcaggatgtggatgttttctacggggtgatccaggcgttgaagcaggtttcgcttgaggttaacaaacgggaaactgtggccctgattggcgctaacggcgcggggaagtcaacattactgatgtctgtctttggtcagccccggatccgcaacgggcagatcctcttctgcggcgaggatatcagccacaaatccacccactatgttgccaccggtggcatcgcgcaggcacctgagggacgacgcattttcccggatatgtctgtagaagagaacctgctgatggggacaatccccgtcggcaatcagcatgcagcggaagatatgcaaagcatgttcgacctcttcccccgcctcaaggagcgacgtaaccagcgggcgatgacgctctccggcggtgaacagcagatgctggctatcgcccgcgcgctgatgagccgtcctaaacttctgctgctggatgaacccagcctcggcctcgcgccaatcgtggttaaacagattttccagacgctgcgcgaactggcccgtaacggaatgacgatttttctggtcgagcagaatgcgcaccacgcgctgaagttgtccgaccgcggctatgtgatggttaacgggcagattcggttaagcggcagcggcgaggcgttgctgaaggatccggaggtgagaaaggcgtatctgggtggcgtgtga

SEQ ID NO: 4902 - protein, 234 aa, Enterobacter cloacae
MLQFQDVDVFYGVIQALKQVSLEVNKRETVALIGANGAGKSTLLMSVFGQPRIRNGQILFCGEDISHKSTHYVATGGIAQAPEGRRIFPDMSVEENLLMGTIPVGNQHAAEDMQSMFDLFPRLKERRNQRAMTLSGGEQQMLAIARALMSRPKLLLLDEPSLGLAPIVVKQIFQTLRELARNGMTIFLVEQNAHHALKLSDRGYVMVNGQIRLSGSGEALLKDPEVRKAYLGGV

SEQ ID NO: 4903 - DNA, 876 bp, Enterobacter cloacae
atgaacgcaacgattttacgtgtagaacatctgatgatgcacttcggcgggatcaaggccttaaacgacgtcaatcttgaggtgcagcgcggctccattaccgcactcattgggcctaacggcgcgggaaaaacgaccgtctttaactgcctgaccggtttctaccgggcctccggcggcaacattctgttcaatgcacgaaataaaaccaccaatgtcattcaggtgctcggccagaaattccagccgggcgactggctcaacccggcgcagcttggtcaacgcctgttctataagatgtttggcggcacgcatctggtgaaccgcgcgggtcttgcgcgcacgtttcagaacatccgcctgttccgcgagatgtccgttgtggaaaacctgctggtggcacagcacatgcgcgtcaaccgcaatctgctggcgggggtgctgaacacccctgcgtatcgtcgctcagagaacgatgcgctggaccgggcgttttactggctggaggtggtggatctggtggattgcgcgaaccgtctggccggggaaatgtcctatggccagcaacgacgcctcgaaatcgcccgcgccatgtgtaccggcccggagatgatttgtctcgatgaacctgctgccggcctgaacccggtggaaacgcacaagctgagtgagatcatccggttcctgcgcgaccaccatgacatcacggttttgctgatcgagcatgatatggggatggtgatgggcatttcagatgacatcattgtgctcgatcatggcgatgtgattgccagaggtaaaccagctgagatccagcacaatgaaaaagtgattgccgcgtatctgggcaccgacgaaagcgaggtaaatctgtga

SEQ ID NO: 4904 - protein, 291 aa, Enterobacter cloacae
MNATILRVEHLMMHFGGIKALNDVNLEVQRGSITALIGPNGAGKTTVFNCLTGFYRASGGNILFNARNKTTNVIQVLGQKFQPGDWLNPAQLGQRLFYKMFGGTHLVNRAGLARTFQNIRLFREMSVVENLLVAQHMRVNRNLLAGVLNTPAYRRSENDALDRAFYWLEVVDLVDCANRLAGEMSYGQQRRLEIARAMCTGPEMICLDEPAAGLNPVETHKLSEIIRFLRDHHDITVLLIEHDMGMVMGISDDIIVLDHGDVIARGKPAEIQHNEKVIAAYLGTDESEVNL

SEQ ID NO: 4905 - DNA, 741 bp, Enterobacter cloacae
atggcaggtcatagtaagtgggccaacaccaaacaccgcaaagcggcacaggatgccaaacgcggtaaaatctttaccaaaatcattcgtgagctggtgacagcggcgcgtttgggcggcggcgatccggcctctaacccacgtctgcgcgcggcggtggataaagccctgtccaacaacatgacgcgtgacaccctgaaccgtgccatcgcacgtggcgtgggcggtgatgaagacgcgaacatggaaaccatcatttatgaaggttacggtcctggcggtacggcggtgatggttgagtgtctgtccgacaaccgtaatcgtaccgttgcggaagtgcgtcacgcgttcaccaaaactggcggcaacctgggcactgacggttctgtagcgtacctgttcagcaaaaaaggcgtcatctccttcgagaaaggcgacgaagatgcgatcatggaagcggcgctggaagccggtgcggaagacgtggtgacctacgacgacggtgctattgatgtttacaccgcatgggaagagatgggtgccgtgcgcgatgcgctggaagcggctggcctgaaggcggataacgctgaagtctccatgatcccgtctaccaaagcggacatggatgcggaaaccgcaccgaaactgctgcgtctgatcgacatgctcgaagactgcgacgacgtgcaggaagtgtatcacaacggtgaaatctctgatgaggttgcagcgactctctga

SEQ ID NO: 4906 - protein, 246 aa, Enterobacter cloacae
MAGHSKWANTKHRKAAQDAKRGKIFTKIIRELVTAARLGGGDPASNPRLRAAVDKALSNNMTRDTLNRAIARGVGGDEDANMETIIYEGYGPGGTAVMVECLSDNRNRTVAEVRHAFTKTGGNLGTDGSVAYLFSKKGVISFEKGDEDAIMEAALEAGAEDVVTYDDGAIDVYTAWEEMGAVRDALEAAGLKADNAEVSMIPSTKADMDAETAPKLLRLIDMLEDCDDVQEVYHNGEISDEVAATL

SEQ ID NO: 4907 - DNA, 414 bp, Enterobacter cloacae
atgagcgaagcacttaaaattctgaacaacatccgtactcttcgtgcgcaggcaagagaatgtacccttgagacgcttgaagaaatgctcgaaaaattagaagttgtagttaacgaacgtcgtgaagaagaaagcgctgctgcggctgaaatcgaagaacgtacacgtaaactgcaacagtatcgtgaaatgctgattgccgatggtatcgatccaaacgaattgctgaacagcatggctgcggctaaaaccggtaccaaagcaaaacgcgcggcacgtcctgctaaatatagctacatcgatgagaacggcgaagagaaaacctggaccggccagggccgtactcctgctgtaatcaagaaagcaatggacgaacaaggtaaacaactggatgacttcctgatcaaggattaa

SEQ ID NO: 4908 - protein, 137 aa, Enterobacter cloacae
MSEALKILNNIRTLRAQARECTLETLEEMLEKLEVVVNERREEESAAAAEIEERTRKLQQYREMLIADGIDPNELLNSMAAAKTGTKAKRAARPAKYSYIDENGEEKTWTGQGRTPAVIKKAMDEQGKQLDDFLIKD

SEQ ID NO: 4909 - DNA, 1374 bp, Enterobacter cloacae
gtgaccgctttttccacgctgaacgttctgcctgaagcccaactgactaacctgaatgagttgggctatctcactatgacccctgtccaggccgccgcgttgccggctatccttgaaggccgtgacgtgcgcgtgcaggcgaaaaccggcagtggaaaaacggctgcatttgggctaggcctgttacaacacattgatgcaaccctgtttcagacccagtccctgatactctgcccgacgcgcgagctggccgaccaggtcgcgggtgagctgcgtcgtctggcgcgttttttgcctaacactaaaattttaacgatctgcggcgggcaaccgttcggtgcgcagcgcgattcccttcagcacgcgccgcatatcattgtggcaacgccgggccgtctgctcgatcacctgcaaaaaggcaccgtttcactcgatgcactgcaaacgctggtgatggatgaagctgaccgcatgctggatatgggcttcagcgatgcgattgacgaagtgatccgctttgccccagccacacgccagacgctgctcttttctgccacctggccagaggcgatagcggcgatcagcgggcgcgtgcagaagaacccgctgaccattgaaatcgatactgtcgatgcgttaccggcgattgagcagcagttcttcgagacatcgcagcacggcaaaattccactgctacaaaaattgctgagccaacaccagccagcgtcctgcgtggtgttctgtaataccaaaaaagattgtcaggcggtgtgcgatgctctgaatgatgccggacagagcgcattatcgctgcatggcgatctggaacagcgcgagcgcgatcagacgctggtgcgtttcgctaacggcagcgctcgcgtgctggttgcaacggatgtggcggcccgtggcctggatattaaatcgcttgagctggtggtgaatttcgaactggcatgggatccggaagtgcatgtccaccgcatcgggcgtaccgcgcgcgcaggtaacagtggtctcgccatcagcttctgcgcacctgaagaggcgcagcgcgccaatattcttgcggaaatgctgcaactaaaactcaactgggtgaatgccccaggtaatatcagcatcgctccgctggcggcggagatggccaccctgtgcatcgacggcggtaaaaaggccaaaatgcgtcccggtgacgttctgggggcgttaactggggatatcggtctcgacggggcagatattggcaagatcacggtccatcctgcgcatgtctacgtagcggttcgccagtcggttgcacataaggcctggaaacagttgcagggcgggaagattaaagggaagacctgccgcgttcgactgctgaaataa

SEQ ID NO: 4910 - protein, 457 aa, Enterobacter cloacae
MTAFSTLNVLPEAQLTNLNELGYLTMTPVQAAALPAILEGRDVRVQAKTGSGKTAAFGLGLLQHIDATLFQTQSLILCPTRELADQVAGELRRLARFLPNTKILTICGGQPFGAQRDSLQHAPHIIVATPGRLLDHLQKGTVSLDALQTLVMDEADRMLDMGFSDAIDEVIRFAPATRQTLLFSATWPEAIAAISGRVQKNPLTIEIDTVDALPAIEQQFFETSQHGKIPLLQKLLSQHQPASCVVFCNTKKDCQAVCDALNDAGQSALSLHGDLEQRERDQTLVRFANGSARVLVATDVAARGLDIKSLELVVNFELAWDPEVHVHRIGRTARAGNSGLAISFCAPEEAQRANILAEMLQLKLNWVNAPGNISIAPLAAEMATLCIDGGKKAKMRPGDVLGALTGDIGLDGADIGKITVHPAHVYVAVRQSVAHKAWKQLQGGKIKGKTCRVRLLK

SEQ ID NO: 4911 - DNA, 936 bp, Enterobacter cloacae
atgcaacaaaatcaagaaattaacaagaaagaacagtacaacctgaataaactgcaaaagcgactgcgccgtaacgtgggcgaagccattgcagacttcaacatgattgaagaaggcgatcgcatcatggtctgcctgtcgggcggtaaagacagctacaccatgctggagatcctgcgcaatctacagcaaagcgcaccggtgaacttttccctggtcgcggttaacctcgatcagaaacagccgggcttcccggagcatatcctgccggagtaccttgagaacctgggcgttgagtacaaaatcgtagaagagaatacctacggcattgttaaagagaagatcccagagggcaaaacgacctgctcgctctgctcacgtttgcgtcgcggcattctgtaccgcaccgcaaccgaactgggcgccaccaagattgcgcttggtcatcaccgggacgacattctgcaaacgctgtttctgaatatgttctatggcggcaaaatgaagggaatgccaccgaagctgatgagcgacgacggcaaacacatcgtgatccgcccactcgcctactgccgcgagaaagacattgagcgtttctcccaggccaaagccttccctatcattccgtgcaatctgtgcggctcacagccgaacctgcaacgtcaggtcattggcgacatgctgcgtgactgggataaacgctatccgggccgcatcgaaaccatgttcagcgccatgcagaacgtggtgccttcgcacctcgccgacgttgaactgttcgatttcaaagggattaaccacggttcagaggtggtgaatggcggggatctggcgtttgaccgcgaagagatcccgatgcagcctgctggctggcagccagaggaagaggatgcgcaattcgatgaactgcgcctgaacgtggtagaagtcaagtaa

SEQ ID NO: 4912 - protein, 311 aa, Enterobacter cloacae
MQQNQEINKKEQYNLNKLQKRLRRNVGEAIADFNMIEEGDRIMVCLSGGKDSYTMLEILRNLQQSAPVNFSLVAVNLDQKQPGFPEHILPEYLENLGVEYKIVEENTYGIVKEKIPEGKTTCSLCSRLRRGILYRTATELGATKIALGHHRDDILQTLFLNMFYGGKMKGMPPKLMSDDGKHIVIRPLAYCREKDIERFSQAKAFPIIPCNLCGSQPNLQRQVIGDMLRDWDKRYPGRIETMFSAMQNVVPSHLADVELFDFKGINHGSEVVNGGDLAFDREEIPMQPAGWQPEEEDAQFDELRLNVVEVK

SEQ ID NO: 4913 - DNA, 417 bp, Enterobacter cloacae
atggcagatttgccggacagagataaattgctgcgcaactttgggcgttgcgcgaactgggaagagaaatacctttatattatcgagctgggccagcgcctgccgccgctcagcgaagaggcgcataacccggacaacatcattcagggctgccagagccaggtctggatcctgatgcagcagacggatgaaggcgtaattgaattacagggtgacagcgatgccgccattgtgaaggggcttattgccgtcgtatttattctttatcaccagatgtcggcgcaggatattgtcgcctttgacgttcgcccgtggtttgaaaaaatggccttaacccagcacctcaccccgtcccgatcccagggactggaagcgatgatccgcgccatacgcgccaaagccgcaatccttagctaa

SEQ ID NO: 4914 - protein, 138 aa, Enterobacter cloacae
MADLPDRDKLLRNFGRCANWEEKYLYIIELGQRLPPLSEEAHNPDNIIQGCQSQVWILMQQTDEGVIELQGDSDAAIVKGLIAVVFILYHQMSAQDIVAFDVRPWFEKMALTQHLTPSRSQGLEAMIRAIRAKAAILS

SEQ ID NO: 4915 - DNA, 1221 bp, Enterobacter cloacae
atgacatttcccgtagagaaagtccgggcagattttccggtactgacccgtgaagtgaacggtctgccgctggcctatctcgacagtgcggccagcgcgcaaaaaccaaatcaggtggtggatgcggaagccgagttttatcgccacggttatgcggcggtacatcgcgggatccacaccctgagcgccgaggcgacccagcgcatggaaaacgtgcgcacgcaggttgcggccttcctcaacgcgcgttcgccggaagagctggtgtttgtgcgtggcaccaccgaagggatcaacctggtggctaacagctggggcaatgcgcaggtgcacgcgggggataacatcatcatcacccagatggagcaccacgccaacatcgtgccctggcagatgctctgtgagcgtgtgggggcgcaactgcgggtgatccccctgaatgaagacggcacgctccagctggaaaagctggacgccctgctggacgacagaacgcggctggtggcggtgacccacgtttcaaacgtgctggggacggaaaatccggtggcgctgatcgtcgacaaagcccatcaggttggtgcgaaagtgttgattgatggcgcccaggcggtgatgcaccatgcggttgacgttcaggctctggactgcgatttctacgtcttctccgggcacaagctgtatggcccgacgggcatcggcgtgttgtatgtgaaagaggacattctccaggccatgccgccgtgggaagggggcgggtcaatgatcgccaccgtcagcctgacggacggcacaacctacgcccgtgcgccctggcgcttcgaggcgggtacgcccaacacgggcgggatcatcgggctgggcgcggccattagctacgtcactgaaacggggctggcggcgattcaggagtacgaacagcagctgatgcattatgccttgcaggagctggccagcgtcccggaactgaccttatatggccctgctgaccgtctgggtgtgatagccttcaacctcggcaagcatcacgcctatgatgtgggcagtttccttgataattacggcgtcgccgtgcgtaccgggcatcactgcgcgatgccgctgatggcgtattatcaggtaccggctatgtgccgcgcatcgctggtgatgtacaacacaacggaagaggtcgacagactggtggcgggactaaaacgtattcaccagctgcttggctaa

SEQ ID NO: 4916 - protein, 406 aa, Enterobacter cloacae
MTFPVEKVRADFPVLTREVNGLPLAYLDSAASAQKPNQVVDAEAEFYRHGYAAVHRGIHTLSAEATQRMENVRTQVAAFLNARSPEELVFVRGTTEGINLVANSWGNAQVHAGDNIIITQMEHHANIVPWQMLCERVGAQLRVIPLNEDGTLQLEKLDALLDDRTRLVAVTHVSNVLGTENPVALIVDKAHQVGAKVLIDGAQAVMHHAVDVQALDCDFYVFSGHKLYGPTGIGVLYVKEDILQAMPPWEGGGSMIATVSLTDGTTYARAPWRFEAGTPNTGGIIGLGAAISYVTETGLAAIQEYEQQLMHYALQELASVPELTLYGPADRLGVIAFNLGKHHAYDVGSFLDNYGVAVRTGHHCAMPLMAYYQVPAMCRASLVMYNTTEEVDRLVAGLKRIHQLLG

SEQ ID NO: 4917 - DNA, 1272 bp, Enterobacter cloacae
atggctggcttaccgaacagcagtaatgcacttcagcagtggcaccggctgtttgaagcgcagggtcgagcgcgctctgaacaggctcagcaccatctccagcagatgctgcgtctcggtttaccgacgcgtaaacatgagaactggaaatataccccgctggatggcctgctgaacggcgagtttgtcacccgtctggcgcaggtcagccccgatcagcgcgacatgctggcgctgagcgtggatgccgtgcgtctggtatttgtcgacggtctgttccgtgcggagctgagcgacagcgtgcaggagagcgggttcgatatcgtcattaacgatgaacgtcagtcgctgaacgcgcccgttcagcctgaagtcttcctgcacctgacagagagcctgtcgcaatctgtcacccatattcgcgttaagcgtaaccagcgtccggcgaaaccgctgctgctgatgcatatcacccagggcgttgagggtgatgagattaacaccgcccactatcgccaccatcttgagctggcagaaggggcagaggcgacggtgatcgagcattacgtcagccttaacgacacccgtcattttaccggttcgcgtctgacgatgaacgtggcggccaatgctcagctgcaccacatcaagctggcgtttgagaatccgctcagtcaccacttcgcccacaacgatattctgctgggccaggatgccgcggcgtacagccacagcttcctgcttggcggcgcggtgctgcgccacaataccagcacccagctgaacggtgaaaacactacgctacgtattaacagcctggcgatgccagtgaagtcagaagtgtgcgacacgcgcacctggcttgagcataacaaaggctactgcaacagccgtcagctgcacaaaaccatcgtcagcgacaaaggacgtgcggtgtttaacggcctgataaacgtggcgcagcacgccatcaaaactgacgggcagatgaccaacaacaacctcttgctgggacgtctggcagaggtggacaccaaaccacagctggaaatttatgcggacgacgtgaaatgcagccacggggcgacggtcgggcgtattgacgatgagcagatgttctacctgcgctcgcgcgggatagaccagcaggccgcgcaaaagatgattatttacgcctttgcggctgagctgacggaagcgctgcccgatggcggacttaaacagcaggtgctggcccgtatcggtcagcggctgcctggaggcgaagcatga

SEQ ID NO: 4918 - protein, 423 aa, Enterobacter cloacae
MAGLPNSSNALQQWHRLFEAQGRARSEQAQHHLQQMLRLGLPTRKHENWKYTPLDGLLNGEFVTRLAQVSPDQRDMLALSVDAVRLVFVDGLFRAELSDSVQESGFDIVINDERQSLNAPVQPEVFLHLTESLSQSVTHIRVKRNQRPAKPLLLMHITQGVEGDEINTAHYRHHLELAEGAEATVIEHYVSLNDTRHFTGSRLTMNVAANAQLHHIKLAFENPLSHHFAHNDILLGQDAAAYSHSFLLGGAVLRHNTSTQLNGENTTLRINSLAMPVKSEVCDTRTWLEHNKGYCNSRQLHKTIVSDKGRAVFNGLINVAQHAIKTDGQMTNNNLLLGRLAEVDTKPQLEIYADDVKCSHGATVGRIDDEQMFYLRSRGIDQQAAQKMIIYAFAAELTEALPDGGLKQQVLARIGQRLPGGEA

SEQ ID NO: 4919 - DNA, 240 bp, Enterobacter cloacae
atgcagcagaacggacacctcgcagactcggcaacagcgattgcgcagtatttcgaaaaagccgcgcttccaacccaacaggaaacattgggtcaggttgttgttgaaatccttagcgacgggcgaaatctgaatcgcaaatcgctctgcacaaaactgttgagtcgccttgaaaaggccaatggcccggaagaggaacatcattatcacatgcttcttggcctgctcttcgaacgttaa

SEQ ID NO: 4920 - protein, 79 aa, Enterobacter cloacae
MQQNGHLADSATAIAQYFEKAALPTQQETLGQVVVEILSDGRNLNRKSLCTKLLSRLEKANGPEEEHHYHMLLGLLFER

SEQ ID NO: 4921 - DNA, 447 bp, Enterobacter cloacae
atgttcgaccctacactgctcatacttttggccctggctgctctgggttttgtcagccacaacaccaccgtcgcgatttccattctggtcctgatcatcgttcgcgtcacaccattgaataccttcttcccgtggatagaaaaacaggggcttaccatcgggatcattattttgaccatcggcgtgatggccccgattgccagcggaacgctaccggcctcaacgctgctgcactcctttgtaaactggaaatcgctggtggcgattgcggtgggcgtttttgtctcatggcttggcgggcgcggcgtgacgctgatgagcagccagccttcactggtggccgggctgctggtgggcaccgtgttaggcgtggcgctgtttcgtggcgtgccggttggcccgctgattgctgccggactggtttcgctgtttatcgggaagtcgtag

SEQ ID NO: 4922 - protein, 148 aa, Enterobacter cloacae
MFDPTLLILLALAALGFVSHNTTVAISILVLIIVRVTPLNTFFPWIEKQGLTIGIIILTIGVMAPIASGTLPASTLLHSFVNWKSLVAIAVGVFVSWLGGRGVTLMSSQPSLVAGLLVGTVLGVALFRGVPVGPLIAAGLVSLFIGKS

SEQ ID NO: 4923 - DNA, 1251 bp, Morganella morganii
atggaaagcaaagtagttgttccggcggaaggtaaaaagatcaccctgcaaaacggcaagattaacgttcctcacaacccgattatcccgttcattgaaggcgacggtatcggcgtagacgttaccccggcaatgctgaaagtggttgatgccgctgttgagaaagcctacaaaggcgagcgtaaaatttcctggatggaaatttacaccggtgaaaaatcgactcaagtttatggccaggacgtctggctgccagccgaaacgctggacctgatccgcgactatcgcgttgctatcaaaggccctctgaccacgccagttggcggcggcattcgctccctgaacgtggcgctgcgtcaggaactggatctgtatgtgtgtctgcgtccggtgcgttactaccagggcaccccaagcccggttaagcacccggaactgaccgacatggttatcttccgtgaaaactcagaagacatctacgccggtatcgaatggaaagcggactctgctgatgcagaaaaagtgattaaattcctgcgcgaagagatgggcgtgaagaaaattcgcttccctgagcattgcggcatcggcatcaagccatgctccgaagaagggaccaagcgtctggtgcgtgccgccatcgaatacgctatcaccaacgatcgtgactctgtgaccctggttcacaaaggcaacatcatgaagttcaccgaaggcgcgttcaaagactggggctaccagctggcgaccgaagagttcggcggtgaactgatcgacggcggcccatggcagaaaattaagaacccgaacaccggtaaagagatcatcattaaagatgtgattgccgatgcgttcctgcaacagatcctgctgcgacctgctgagtatgacgtgatcgcctgtatgaacctgaatggtgactacatctccgatgcgctggcagcacaggtgggtggtatcggtatcgccccgggcgcgaacatcggtgacgagtgcgccctgttcgaagcaactcacggtactgcacctaaatacgcaggccaggacaaagtcaacccaggctctatcattctgtccgcagagatgatgctgcgtcatatggaatggttcgaagccgcagacctaatcgttaagggtatggaaggcgcgattaacgcgaaaaccgtcacctatgactttgaacgtctgatggaaggcgctaaactgctgaaatgctcagagtttggcgacgcgattatcgcgaacatgtaa

SEQ ID NO: 4924 - protein, 416 aa, Morganella morganii
MESKVVVPAEGKKITLQNGKINVPHNPIIPFIEGDGIGVDVTPAMLKVVDAAVEKAYKGERKISWMEIYTGEKSTQVYGQDVWLPAETLDLIRDYRVAIKGPLTTPVGGGIRSLNVALRQELDLYVCLRPVRYYQGTPSPVKHPELTDMVIFRENSEDIYAGIEWKADSADAEKVIKFLREEMGVKKIRFPEHCGIGIKPCSEEGTKRLVRAAIEYAITNDRDSVTLVHKGNIMKFTEGAFKDWGYQLATEEFGGELIDGGPWQKIKNPNTGKEIIIKDVIADAFLQQILLRPAEYDVIACMNLNGDYISDALAAQVGGIGIAPGANIGDECALFEATHGTAPKYAGQDKVNPGSIILSAEMMLRHMEWFEAADLIVKGMEGAINAKTVTYDFERLMEGAKLLKCSEFGDAIIANM

SEQ ID NO: 4925 - DNA, 792 bp, Citrobacter koseri
atgatcggtcgactgcttcgcggcggttttatgaccgccatttatgcgtatctctatattccgataatcattttgatcgtgaactcctttaacagctcacgcttcgggatcaactggcaagggtttaccaccaaatggtatggcctgctgatgaacaatgacagcctgctacaggccgctcagcactcgctgacgatggcggtattctctgccaccttcgcgacgctgattggctcactgaccgccgtggcgctgtaccgctaccgttttcgcggtaagccgttcgtcagtggcatgctgtttgtggtgatgatgtccccggatatcgtgatggccatttcactgctggtgctgtttatgctgctgggcgtccagctcggtttctggtcgctgctgttctcgcatatcaccttctgtctgccgtttgtggtggtaaccgtctacgcgcgtctgaaagggttcgacgtacgcatgctggaagcggcgaaagatctgggtgcgagcgagatgaccattctgcgcaaaatcattctgccgctggcgatgcccgccgtggcagcaggatggctgctcagctttaccctgtcgatggacgacgtggtcgtgtcctccttcgtcaccgggccgagctatgaaattctgccgttgaagatctactcaatggttaaagtcggtgtttcacccgaagtgaacgcgctggcgactattctgttggtgttatcgctggttctggtaattgccagccaggttattgctcgtgataaaacaaaatctcaggggacacagaaatga

SEQ ID NO: 4926 - protein, 263 aa, Citrobacter koseri
MIGRLLRGGFMTAIYAYLYIPIIILIVNSFNSSRFGINWQGFTTKWYGLLMNNDSLLQAAQHSLTMAVFSATFATLIGSLTAVALYRYRFRGKPFVSGMLFVVMMSPDIVMAISLLVLFMLLGVQLGFWSLLFSHITFCLPFVVVTVYARLKGFDVRMLEAAKDLGASEMTILRKIILPLAMPAVAAGWLLSFTLSMDDVVVSSFVTGPSYEILPLKIYSMVKVGVSPEVNALATILLVLSLVLVIASQVIARDKTKSQGTQK

SEQ ID NO: 4927 - DNA, 1068 bp, Citrobacter braakii
atggttgcgtcctgtactggacaaggtaaaaacatcaaccgcagtacccggcgcggaggctcagactccggcagcgatttcttcaccaccaaattctctccttcacctcaagaacctttttctaccgacgtgcataacggtgcgcgtagccgttgtatatcgtcatccggtaatgcaagcaatggcttacaaggaagccaaccctctgatgttcgtgcgcataatcgtgccgatgctggcgcgtgtgatgaataccaacaactcaaggtgctatccatgggaagacagaaagcagtgatcaaagctcgtcgtgaagcaaaacgtgtgctgagacgggattcacgtagccataagcagcgtgaagaagaatcggtcacctcgcttgtgcagatgagcggcgtagaatccattggcatggcgcgggacagccgcgatgcatcgccaattgtggcgcggaatgaagctcaggcgcactacctgaatgctatcgagagtaaacagctcatctttgcaaccggggaagccggatgcgggaaaacctggatcagcgccgccaaagcggcggaggcgctgattcataaggacgtggaaaggatcatcgttacccgtccggtactgcaagcggatgaagatctgggcttcctgcccggcgatatttccgagaagtttgccccgtacttcaggcccgtctatgacgtgctggtgaagcggttgggcgcttcctttatgcagtactgcctgcgaccagagattggcaaggtggaaatcgcgccgttcgcctatatgcgcggacgtacatttgaaaatgcggtcgttattcttgacgaggctcagaatgtgaccgctgcgcaaatgaagatgtttttaacgcgcctcggggagaacgtgacggttatcgtcaacggcgatattacccagtgtgacctgccgtcgggcgtgaagtccggcctgagcgatgccatgtcacgttttgaggaagatgagatgataggggtggtccgcttcacaaaagaggactgcgtccgctcagcgctgtgccaacgaacgctggaagtgtactccgactaa

SEQ ID NO: 4928 - protein, 355 aa, Citrobacter braakii
MVASCTGQGKNINRSTRRGGSDSGSDFFTTKFSPSPQEPFSTDVHNGARSRCISSSGNASNGLQGSQPSDVRAHNRADAGACDEYQQLKVLSMGRQKAVIKARREAKRVLRRDSRSHKQREEESVTSLVQMSGVESIGMARDSRDASPIVARNEAQAHYLNAIESKQLIFATGEAGCGKTWISAAKAAEALIHKDVERIIVTRPVLQADEDLGFLPGDISEKFAPYFRPVYDVLVKRLGASFMQYCLRPEIGKVEIAPFAYMRGRTFENAVVILDEAQNVTAAQMKMFLTRLGENVTVIVNGDITQCDLPSGVKSGLSDAMSRFEEDEMIGVVRFTKEDCVRSALCQRTLEVYSD

SEQ ID NO: 4929 - DNA, 1128 bp, Citrobacter koseri
atggccattcagttccgtcgtagtgcgttatgcgcaggcattgccgcgctgttcgtgtctgccttcaccgctcaggcggcagatattccgcaggtaaaagtcaccgtcaacgataaacagtgcgagccgatgaccatcacggttaacagcggtaaaacgcagtttattattcagaaccacagccagaaggcgctggagtgggaaattctgaaaggcgtgatggtggtggaagagcgcgagaatatcgcgccgggcttcagccagaagatgaccgcaaatcttcagcccggggaatatgacatgacctgcggcctgctgactaacccgaaaggtaagctgatcgtcaaaggcgcagcgacggcggatgcggccaaaggcacggcgctgctgagcctcggcgacgccattaccgcctataaagcctacgtcaccaaagagacagcggacctggtggcaggcaccaaagcctttaccgacgcggtgaaagcgggcgacatcgaaaaagcgaaatccctgtatgcgcctacccgtcagcactacgagcgcattgagccgattgccgaactgttctctgacctcgatggcagcattgacgcccgtgaagacgactacgagcagaaggccgccgatccgaaattcaccggcttccaccgtctggaaaaagccctgtttggcgataactccaccagtgggatggagaaatacgccgagcagctcaacagcgacgtgctggagctgcaaaaacgcatcagcgagctggcattcccaccgtcgaaagtggtgggtggcgcagcgggcctgattgaagaagtggccgccagcaaaatcagcggtgaagaagatcgttacagccacaccgacctgtgggacttccaggcgaacgtcgacggcgcacagaaaattgtcgatctgctgcggcctcagctgcaaaaagagaacggcgagctgctggcgaaagtggatgccaactttaagaaagttgacgctatcctggcgaaataccgcaccaaagacgggttcgaaacctacgacaagctgaccgatgctgaccgtaacgcgctgaaaggcccgataaccaccctggcggaagatctctccctgctgcgtggcgtactgggtctggattaa

SEQ ID NO: 4930 - protein, 375 aa, Citrobacter koseri
MAIQFRRSALCAGIAALFVSAFTAQAADIPQVKVTVNDKQCEPMTITVNSGKTQFIIQNHSQKALEWEILKGVMVVEERENIAPGFSQKMTANLQPGEYDMTCGLLTNPKGKLIVKGAATADAAKGTALLSLGDAITAYKAYVTKETADLVAGTKAFTDAVKAGDIEKAKSLYAPTRQHYERIEPIAELFSDLDGSIDAREDDYEQKAADPKFTGFHRLEKALFGDNSTSGMEKYAEQLNSDVLELQKRISELAFPPSKVVGGAAGLIEEVAASKISGEEDRYSHTDLWDFQANVDGAQKIVDLLRPQLQKENGELLAKVDANFKKVDAILAKYRTKDGFETYDKLTDADRNALKGPITTLAEDLSLLRGVLGLD

SEQ ID NO: 4931 - DNA, 834 bp, Citrobacter koseri
atgtttgttccttttctcattatgttacgtgaaggccttgaagcggccctgattgttagccttatcgccagttatctgaagcgtacccagcgcggacgctggattggcgtcatgtgggttggggttttccttgctgcggcgctctgcctgggcctcggtatcctcatcaacgaaaccaccggggagttcccgcagaaagagcaggagctgtttgaagggatcgtcgccgtgattgcggtggtgatcctcacctggatggtgttctggatgcgcaaggtctcccgtaacgtgaaggtacagcttgagcaggcggtggataacgccctgcaaaaaggcaaccaccacggctgggcgctgatcatgatggtctttttcgccgtggcgcgtgaaggcctggagtctgtgttcttcctgctcgcggcttttcagcaggacgtgggcatctggcccccactgggcgcggtgctcgggctggccacggcggttgtgcttggcttcctgctctactggggcggcattcgtcttaacctgggggtgttcttcaagtggaccagcctgtttattctgctggtggccgcagggctggcggcaggggcgatccgcgccttccacgaagcgggtctgtggaaccacttccaggacgtggcgttcgatctcagcaacgtcctgtcgacccattcactgaccggtaccctgctcgaagggatcttcggctaccaggaaacgccgagcgtcagcgaagtggcgatgtactttatctatctggttccggcgctgatcctgttcgctatgccgccgcgtaccggctcgcagacgtcgcgcgtagcgccgtaa

SEQ ID NO: 4932 - protein, 277 aa, Citrobacter koseri
MFVPFLIMLREGLEAALIVSLIASYLKRTQRGRWIGVMWVGVFLAAALCLGLGILINETTGEFPQKEQELFEGIVAVIAVVILTWMVFWMRKVSRNVKVQLEQAVDNALQKGNHHGWALIMMVFFAVAREGLESVFFLLAAFQQDVGIWPPLGAVLGLATAVVLGFLLYWGGIRLNLGVFFKWTSLFILLVAAGLAAGAIRAFHEAGLWNHFQDVAFDLSNVLSTHSLTGTLLEGIFGYQETPSVSEVAMYFIYLVPALILFAMPPRTGSQTSRVAP

SEQ ID NO: 4933 - DNA, 402 bp, Enterobacter hormaechei
atgcacgccagctggacatatcgcctgcgctttatcaaaaaacatctgctgatgtttttgctggcgtttggctggctgttgatccagagtcaggtggccgtcgcctcccatcaatgttcaatggatttgcgcggcgaggtggccaccatccagcatatggagatgatggcgcaaccggggccgcattatgctgccggtgcttcaccgctgtgtgaaaaacattgtgtgccggatcaggtacaaaaagatcctgcccagccgcatctggtggcgctgcctgccgccatgaccctgaccttaacgaccccagagtgctcgtctgcaagccattctgcgtggtccgttacccctcctgctgtggggccgccggcaacgatccgctactgccggtttcgggagtaa

SEQ ID NO: 4934 - protein, 133 aa, Enterobacter hormaechei
MHASWTYRLRFIKKHLLMFLLAFGWLLIQSQVAVASHQCSMDLRGEVATIQHMEMMAQPGPHYAAGASPLCEKHCVPDQVQKDPAQPHLVALPAAMTLTLTTPECSSASHSAWSVTPPAVGPPATIRYCRFRE

SEQ ID NO: 4935 - DNA, 2106 bp, Klebsiella oxytoca
atgaacaactcagggaaataccttacgtgggcggtgctctccgtggtgggagcctttgccctgggctatatcgccctcaaccggggggagcagatcaacgcgctgtggatcgtcgtcgcctccgtctgcatttatctgatcgcataccgtttttatggccgctatatcgctaagacggtactgggcgtagacggcacgcgcatgacgccggccgtgcgtcataacgacggtctggactacgtgccgaccgataaaaaagtgctgttcggtcaccatttcgcggcgattgccggggcaggcccgctggtggggccggtactggccgcgcagatgggctacctgccagggatgatctggatcctcgcgggggtggtgctggcgggcgcggtgcaggacttcatggtgctgttcgtctccacccgccgcgacggtcgttcactgggtgagctggtgaaagaggagatgggcgcaaccgccggggtgattgcgctggtggcgacctttatgatcatggtgatcatcctcgcggtgctggcgatgatcgtggtgaaagccttgacccacagcccgtggggaacctataccgtcgccttcaccattccgctggcgctgtttatggggatctatatccgctatctgcgtccggggcgcattggtgaagtttcagttattggcctggtgttcctggtgtttgccattatctccggcggctgggtagcggaaagcccgacctgggcgccgttcttcgacttcaccggcgtgcagctgacctggatgctggtgggctatggctttgtggcggcggtgctgccggtgtggctgctgctggccccgcgtgactacctctccaccttcctgaaaatcggcaccatcgtcgggctggcgatcggcattctgattatgcgcccgaccctgaccatgcctgcgctgaccaaatttattgacggcaccggcccggtctggaccggtaacctgttcccgttcctgtttatcaccatcgcctgcggcgcggtgtcgggcttccacgcgctgatcgcctccggaaccacgccgaagatgctggcgaatgaaaatcaggcctgcctgattggctacggcggcatgctgatggaatccttcgtggcgattatggcgctggtttcggcctgtattattgacccgggcgtttactttgcgatgaacagcccaatggcggtactggccccggccggcaccgttgacgtggttgcctctgccgcgcaggtggtcagcggctggggctttacgattacccctgaaacgttgacgcatatcgctaatgaggtcggcgagcagtcaattatctcccgcgcaggcggggcgccaacgctggcggtgggcatggcctacattctgcacggcgcgctgggcgggctgatggatgtctcgttctggtatcacttcgccattctgttcgaggcgctgtttattctgacggcggtggatgccggtacgcgtgcggcgcgctttatgttgcaggatctgctgggggtgatctccccgaacctgaagcgtaccgattcactcccggctaacctgctggcgacggcgctgtgcgtgctggcgtggggctacttcctgcatcagggcgtggtcgatccgctcggcgggattaacaccctgtggccgctgttcggtatcgccaaccagatgctggcgggcatggccctgatgctctgtgccgtagtcctgttcaagatgaagcgccagcgttacgcatgggtggcgctggtgccaacggcgtggctgctgatctgtaccctgaccgcgggctggcagaaagccttcagcccggacaataaggtgggcttcctggcgatcgccaacaagttccaggcgatgatcgacagcggtaagatcccggcacagtacaccgaatctcaactgtcgcagctggtgtttaacaaccgtctggacgccgggctgaccatcttctttatggtggtggttgtggtgctggcgttgtattctctgaaaaccgcgctggcggcgttgaaagtcgacaaaccgacggcgaaagagacgccgtatgagccaatgcctgagaacctggacgagattgtcacccaggcgaaaggggcgcattaa

SEQ ID NO: 4936 - protein, 701 aa, Klebsiella oxytoca
MNNSGKYLTWAVLSVVGAFALGYIALNRGEQINALWIVVASVCIYLIAYRFYGRYIAKTVLGVDGTRMTPAVRHNDGLDYVPTDKKVLFGHHFAAIAGAGPLVGPVLAAQMGYLPGMIWILAGVVLAGAVQDFMVLFVSTRRDGRSLGELVKEEMGATAGVIALVATFMIMVIILAVLAMIVVKALTHSPWGTYTVAFTIPLALFMGIYIRYLRPGRIGEVSVIGLVFLVFAIISGGWVAESPTWAPFFDFTGVQLTWMLVGYGFVAAVLPVWLLLAPRDYLSTFLKIGTIVGLAIGILIMRPTLTMPALTKFIDGTGPVWTGNLFPFLFITIACGAVSGFHALIASGTTPKMLANENQACLIGYGGMLMESFVAIMALVSACIIDPGVYFAMNSPMAVLAPAGTVDVVASAAQVVSGWGFTITPETLTHIANEVGEQSIISRAGGAPTLAVGMAYILHGALGGLMDVSFWYHFAILFEALFILTAVDAGTRAARFMLQDLLGVISPNLKRTDSLPANLLATALCVLAWGYFLHQGVVDPLGGINTLWPLFGIANQMLAGMALMLCAVVLFKMKRQRYAWVALVPTAWLLICTLTAGWQKAFSPDNKVGFLAIANKFQAMIDSGKIPAQYTESQLSQLVFNNRLDAGLTIFFMVVVVVLALYSLKTALAALKVDKPTAKETPYEPMPENLDEIVTQAKGAH

SEQ ID NO: 4937 - DNA, 414 bp, Citrobacter rodentium
atgatctggaaacgtcatttaacgctcgaggagctgaacgccaccagcctgaatacgatggtggggcaccttggcatcgtctatacccgcctcggggacgatacgctggaagcagagatgccggtggatgcccgcacccaccagccgtttggcctgctgcatggcggcgcctcggcggcgctggcggaaacgctgggctcaatggccggttttctgatgacccgtgacgggcagaacgtggtgggcacggaactgaatgccacgcaccaccgcgcggtctctcacggtaaggtacgcggcgtgtgtcagccgctgcatctgggccgttccagccagagctgggagatcgtggtgttcgacgagcaggggcggcggtgctgtacctgtcggttgagtacgatggtgttggggtaa

SEQ ID NO: 4938 - protein, 137 aa, Citrobacter rodentium
MIWKRHLTLEELNATSLNTMVGHLGIVYTRLGDDTLEAEMPVDARTHQPFGLLHGGASAALAETLGSMAGFLMTRDGQNVVGTELNATHHRAVSHGKVRGVCQPLHLGRSSQSWEIVVFDEQGRRCCTCRLSTMVLG

SEQ ID NO: 4939 - DNA, 1680 bp, Kluyvera intermedia
gtgaacagtgagaaacagtcacgtcagtgggcgcacggcgccgatatggttgtcggccagctggaagcgcagggtgtgaagcaggtgttcggcataccgggcgcaaaaatcgacaaggtctttgactccctgctggactcctccatcgagattatcccggtgcgtcacgaggcgaacgcggcgtttatggcggcagcggtagggcggctaaccggtaaggccggggtcgcgctggtcacctccgggccgggctgctccaacctgatcaccggcatcgccaccgccaacagcgaaggtgacccggtggtggcgctgggcggggcggtgaagcgggcagataaagcgaaactggtgcaccagagcatggataccgtcgccatgttcagcccggtcaccaaatacgccgtcgaagttaattcaccggacgcgattgccgaggtggtgtcgaacgcgtttcgcgctgccgagcagggcaggccgggcggggcgtttgtcagcctgccgcaggatattgtcgaccagcccaccacgggggcgattttacccgccagcaccgcggcgctgatgggcccggcgccggagtcagccatcaacgacgtggcgaagcttatcgcgaaggccaaaaacccggtcatcttactcggcctgatggccagccagcccgccaacagcgccgcgctgcataagctgctggagagaagccgtattccggtcaccagcacctatcaggccgccggggcggtgaatcaggaacacttcacccgcttcgccggacgcgtcggcctctttaacaaccaggcgggcgaccggctgctgcatctggcggacctgattatctgcatcggctacagcccggtggagtacgagccgtccatgtggaacagcggcgacgccacgctggtgcacattgacgtgctgcccgcttatgaggagcgcaagtatgttcccgatctggaactggtcggggatattgccgccacgctgaatctgcttgccagtcgaatcgagcacaaacttgaactcagccagcgcgcctcggaaattcttgtcgatcgccagcatcagcgggacctcctcgaccgtcgcggcgcatcgcttaaccagtttgccctgcatccgctgcgcattgtgcgcgccatgcaggacatcgtgaataacgacgtaacgctcaccgtcgacatgggcagcttccacatctggatcgcccgctacctctacagcttccgggcgcgtcaggtgatgatctccaacggtcagcagaccatgggcgtggcgctgccgtgggcgattggcgcgtggctggtcaacccggggcgcaaggtggtctcggtctccggggacggcggctttttgcagtcgagcatggagctggaaaccgccgtacgcctgaacgccaacgtgctgcacatcatctgggtggataacgcctacaacatggtggccatccaggaagagaaaaaataccagaggctttccggcgtcgagttcggcccggtcgatttcaaagcctatgccgacgcgttcggtgcgaaaggctttgccgtcgagagcgcggacgcgcttgagccgacgctgcgtgcggcaatggatgtcgatggcccggccgtggtggccattcccgtcgactacagcgataacccgctgctgatgggccagctccatctcagccagattttgtga

SEQ ID NO: 4940 - protein, 559 aa, Kluyvera intermedia
MNSEKQSRQWAHGADMVVGQLEAQGVKQVFGIPGAKIDKVFDSLLDSSIEIIPVRHEANAAFMAAAVGRLTGKAGVALVTSGPGCSNLITGIATANSEGDPVVALGGAVKRADKAKLVHQSMDTVAMFSPVTKYAVEVNSPDAIAEVVSNAFRAAEQGRPGGAFVSLPQDIVDQPTTGAILPASTAALMGPAPESAINDVAKLIAKAKNPVILLGLMASQPANSAALHKLLERSRIPVTSTYQAAGAVNQEHFTRFAGRVGLFNNQAGDRLLHLADLIICIGYSPVEYEPSMWNSGDATLVHIDVLPAYEERKYVPDLELVGDIAATLNLLASRIEHKLELSQRASEILVDRQHQRDLLDRRGASLNQFALHPLRIVRAMQDIVNNDVTLTVDMGSFHIWIARYLYSFRARQVMISNGQQTMGVALPWAIGAWLVNPGRKVVSVSGDGGFLQSSMELETAVRLNANVLHIIWVDNAYNMVAIQEEKKYQRLSGVEFGPVDFKAYADAFGAKGFAVESADALEPTLRAAMDVDGPAVVAIPVDYSDNPLLMGQLHLSQIL

SEQ ID NO: 4941 - DNA, 783 bp, Klebsiella oxytoca
atgatgatgcattcatctgcatgcggctgtgaggcgagtttatgcgagaccctgcgtgggttctcggctcagcatcctgacagcgtgatctatcagacatcgctaatgagcgccctgctaagcggcgtctacgaaggggagacgaccatcgccgacctgctggcacacggtgattttggtctcggtacctttaacgagctggacggtgaaatgattgccttcagcagccaggtgtaccagctgcgcgccgacggcagcgcccgcgccgcgaagccggagcaaaaaacgccgttcgcggtgatgacctggttccagccgcagtaccgcaaggccttcgacgggccggtcagccgtcagcagatccacgacgtgatcgacaagcaaatcccctccgataacctgttctgcgcgctgcgcatcgacggcaatttccgccacgcgcacacccgcaccgtaccgcgccagacaccgccgtaccgggcgatgaccgacgtgctggatgaccagccggtgttccgctttaaccagcgcgagggcgtactggtcgggttccgcaccccgcagcatatgcagggcattaacgtggcgggctatcacgaacactttatcaccgacgaccgtcagggcgggggccacctgctcgactatcagctggagaacggcgtgctcaccttcggcgaaatccacaagctgatgattgacctgcccgccgacagcgcgtttttacaggccaacctgcaccccagcaaccttgatgcggctatccgcgccgtcgaaaactaa

SEQ ID NO: 4942 - protein, 260 aa, Klebsiella oxytoca
MMMHSSACGCEASLCETLRGFSAQHPDSVIYQTSLMSALLSGVYEGETTIADLLAHGDFGLGTFNELDGEMIAFSSQVYQLRADGSARAAKPEQKTPFAVMTWFQPQYRKAFDGPVSRQQIHDVIDKQIPSDNLFCALRIDGNFRHAHTRTVPRQTPPYRAMTDVLDDQPVFRFNQREGVLVGFRTPQHMQGINVAGYHEHFITDDRQGGGHLLDYQLENGVLTFGEIHKLMIDLPADSAFLQANLHPSNLDAAIRAVEN

SEQ ID NO: 4943 - DNA, 1437 bp, Enterobacter roggenkampii
atgaatacgtcagttgtttcaccgggtcgtgcgggcctgatactgctgttaaccggccagatgctgccgctgattgatacctcaatcaccaacgtggcgctggattccatcacccattcattacacgccaccgccaccgaactggagctgatcgtcgccctctacggcgtggcctttgccgtctgcctggcccccggcagcaagctgggcgataaccttggccgccgtcgcctgtttatgtggggcgtggcgtgttttggcctggcctcgctgctgtgcggcatggcgggcaatatcgaacagttgcttggcgcgcgcattcttcagggcgcgggcgccgcgctgatcatgccgcaaattctcgcgacgttgcatgtgacgttaaaaggatcggcacacgccagagcgatcagcctgtttggaggtatcggcggaattgcgtttatcgtcggccagatgggtggcggctggctggtgtcggcggacatcgccgggctgggctggcgcaacgccttctttatcaacgtgccgatttgtctggtggtgctggcgctgagccgtcgctacgtgccggaaacccgccgcgacacgccgtcgcgcattgactggaccgggactgtcctgctgacggcaatactgtgctgtctgctgttcccgatggcgctcggcccgcagtggcactggtcgtggccgctgaaggccgcactgctggcgattgtgccgctgggctgtttgatggtgctgaacgcgcgcaaaaaagagcgtgagaatgcccacccgctcatcgcgccacgcctgttacagctgcgcagcatccgctttggcgtgctgatcgggatactctttttcagcgtctggtccgggttcatgttctgtatggcgctgaccatgcaaagcggtctggggatggcgccgtggcagtccgggaacagctttatcgcgcttggcgtcacctattttatttctgcctggttcgccccacgcctgattgcccgttacagcaccagcgccatcctgctgaccgggcttgcgattcagcttgtcggcctggtggcgctgatcgccacgttccgtcactggggaatgcagaataccgcgctgacgctggccccggccaccgggctggtgggttacgggcaggcgctgattgtaaacagcttctaccgtatcgggatgcgcgatattcagcctgacgacgcgggggccgcgagcgcgattttaagcacgctgcaacaggctgcgctggggcttggcccggccattttcggcgcgattttgctgcacgggctgcaaaatcatcacggagattatacccaggcggtcaacgtcttcctgatggtggaaacggccatgatggtggtgctggcgctggtcacgctgcgtatgcgtcatcgtctgtgtttaccggtcgtcaaggcctgtccggcgacaaaataa

SEQ ID NO: 4944 - protein, 478 aa, Enterobacter roggenkampii
MNTSVVSPGRAGLILLLTGQMLPLIDTSITNVALDSITHSLHATATELELIVALYGVAFAVCLAPGSKLGDNLGRRRLFMWGVACFGLASLLCGMAGNIEQLLGARILQGAGAALIMPQILATLHVTLKGSAHARAISLFGGIGGIAFIVGQMGGGWLVSADIAGLGWRNAFFINVPICLVVLALSRRYVPETRRDTPSRIDWTGTVLLTAILCCLLFPMALGPQWHWSWPLKAALLAIVPLGCLMVLNARKKERENAHPLIAPRLLQLRSIRFGVLIGILFFSVWSGFMFCMALTMQSGLGMAPWQSGNSFIALGVTYFISAWFAPRLIARYSTSAILLTGLAIQLVGLVALIATFRHWGMQNTALTLAPATGLVGYGQALIVNSFYRIGMRDIQPDDAGAASAILSTLQQAALGLGPAIFGAILLHGLQNHHGDYTQAVNVFLMVETAMMVVLALVTLRMRHRLCLPVVKACPATK

SEQ ID NO: 4945 - DNA, 1389 bp, Klebsiella oxytoca
gtgaaagacgcgtcatccgcttcaggccatggtagcgctgaagcttcgtcggatcagagtccgacgctgcaacgtggtttgcaaaatcgacatattcagttaattgcccttggcggcgcgatcggtaccgggctgtttctcggcatcggccccgccattcaaatggctggcccggcggttctgctgggttacgctatcgccgggattatcgccttcctgatcatgcgccagctcggcgagatggtcgttgaagagccggtgtccggctccttcgcacactttgcctataaatactgggggccgttcgcaggcttcctctccggctggaactactgggtgatgttcgtgctggtgggcatggcagagctgaccgccgctggcatctatatgcagtactggctcccggacgtgccgacgtggatttgggccgcggccttcttcatcatcattaacgccgttaaccttgtgaacgtgcgcctgtatggcgagaccgagttctggtttgcgctgatcaaggtgctggcgattattggcatgatcggctttggcctgtggctgctgttctccggtcacggcggcgagcgtgcaagcatcgacaacctgtggcagcacggcggctttctggcgaccggctggaaagggctgatcctgtcgctggcggtcattatgttctccttcggcgggctggagctgattggcatcaccgcggctgaagcgcgcgatccgcacaaaagcattccgaaagcggtcaaccaggtggtgtaccgtatcctgctgttctatatcggctcgctggtggtgctgctggcgctctatccgtgggtggaagtgaaatctgacagtagcccgttcgtgatgatcttccacgatttgaacagcaacgtggtggcttcggcgctcaacttcgtcattctcgtggcgtcattgtcggtttacaacagcggggtttactccaacagccgcatgctgtttggcctctccgtacagggcaacgcgccgaagttcctcacccgcgtcagccgtcgcggcgtgccgatcaattcgctgttcctttctggcgctatcacctcgctggtggtgctgattaactatctgctgccgaaagaggcgtttggcctgctgatggcgctggttgtcgccacgctgctgctgaactggatcatgatctgcctggcgcaccttcgcttccgcgcggcgatgcgacgcaaggggcgcgagacgcagtttaaagcgctgctctatccggcggggaactacctctgtatcgccttcctcggcctgattctggtgctgatgtgcaccatggatgagatgcgcctgtcagcgatgctgctgccggtgtgggtggtgttcctgtttatcgcgtttaagctttcacgcaaaaagtag

SEQ ID NO: 4946 - protein, 462 aa, Klebsiella oxytoca
MKDASSASGHGSAEASSDQSPTLQRGLQNRHIQLIALGGAIGTGLFLGIGPAIQMAGPAVLLGYAIAGIIAFLIMRQLGEMVVEEPVSGSFAHFAYKYWGPFAGFLSGWNYWVMFVLVGMAELTAAGIYMQYWLPDVPTWIWAAAFFIIINAVNLVNVRLYGETEFWFALIKVLAIIGMIGFGLWLLFSGHGGERASIDNLWQHGGFLATGWKGLILSLAVIMFSFGGLELIGITAAEARDPHKSIPKAVNQVVYRILLFYIGSLVVLLALYPWVEVKSDSSPFVMIFHDLNSNVVASALNFVILVASLSVYNSGVYSNSRMLFGLSVQGNAPKFLTRVSRRGVPINSLFLSGAITSLVVLINYLLPKEAFGLLMALVVATLLLNWIMICLAHLRFRAAMRRKGRETQFKALLYPAGNYLCIAFLGLILVLMCTMDEMRLSAMLLPVWVVFLFIAFKLSRKK

SEQ ID NO: 4947 - DNA, 1380 bp, Citrobacter freundii
ttgaacaggttaccttccagcgcctcggctcttgcctgtaccgcgcacgcactgaatctcattgagaagcgaacgcttgatcatgaggagatgaaacaacttaaccgtgaggtcattgattactttaaggagcatgtgaatccaggttttctggagtatcgcaaatctgttaccgccggcggggattacggagccgtagagtggcaagcgggcagtctgaatacgcttgtcgacacccagggacaggagtttatcgattgcctgggtggttttggtattttcaacgtggggcaccgtaatccagttgtggtttccgccgtacagaatcaacttgcgaaacaacctctccatagccaggaactgctcgatccgcttcgcgccatgctcgcgaaaacgctggcagccttaacgcccggtaagctgaaatacagcttcttcagcaacagcggcaccgaatcggtcgaagcggcgattaaactcgccaaagcgtaccagtcgccgcgcgggaaatttacctttatcgccaccagcggcgcgttccacgggaaatccctgggcgctctgtcggcgaccgctaaatctaccttccgcaagccgtttatgccgctgctgccgggcttccgccacgtgccgtttggcgacatcaacgccatgcgcatcgtgatgagtgaatgccgtaaaaccggcgacgacgtggcggcggtgatcctggagccgattcagggtgaaggcggcgtgatcctcccgccgcagggctatctgcccgccgtgcgtcagctgtgcgatgagtttggcgcgctgctgatcttcgacgaagtgcagaccgggatggggcgcaccggcaagatgttcgcctgcgagcacgagaacgttcagccggacattctgtgcctggcgaaagcgctcggtggcggcgtgatgccgattggcgcaacggtcgccactgaggaggtcctctcggtgctgttcgataacccgttcttacataccaccacctttggcggtaacccgctggcctgtgcggcggcgctggccaccatcaacgtgctgctggagcaaaacctgcccgcgcaagcggagcagaaaggcgacatgctgctggacggcttccgtcagttgggccgggaatatccggatctggtacaggatgcgcgcgggaaagggatgctgatggcgattgagttcgttgataacgaaaccggttatagcttcgcaagcgagatgttccgccagcgggtactggtggcgggaacgcttaacaactcgaaaaccatccgcattgagccaccgttgacgcttaccattgagcagtgtgagcaagtgctgaaggcggcgcgtaaagcgctggcggcattacgtattgccgtaacatccgcctga

SEQ ID NO: 4948 - protein, 459 aa, Citrobacter freundii
MNRLPSSASALACTAHALNLIEKRTLDHEEMKQLNREVIDYFKEHVNPGFLEYRKSVTAGGDYGAVEWQAGSLNTLVDTQGQEFIDCLGGFGIFNVGHRNPVVVSAVQNQLAKQPLHSQELLDPLRAMLAKTLAALTPGKLKYSFFSNSGTESVEAAIKLAKAYQSPRGKFTFIATSGAFHGKSLGALSATAKSTFRKPFMPLLPGFRHVPFGDINAMRIVMSECRKTGDDVAAVILEPIQGEGGVILPPQGYLPAVRQLCDEFGALLIFDEVQTGMGRTGKMFACEHENVQPDILCLAKALGGGVMPIGATVATEEVLSVLFDNPFLHTTTFGGNPLACAAALATINVLLEQNLPAQAEQKGDMLLDGFRQLGREYPDLVQDARGKGMLMAIEFVDNETGYSFASEMFRQRVLVAGTLNNSKTIRIEPPLTLTIEQCEQVLKAARKALAALRIAVTSA

SEQ ID NO: 4949 - DNA, 2022 bp, Enterobacter cloacae
atgagccgctacccgtcgttattcgcccctctcgatctggggttcaccaccctcaaaaaccgcgtgctgatgggctcgatgcacaccgggctggaggagcgtccggacggggctgaacgtctggcagccttctatgccgagcgcgcgcgccacggggtggcgctgattgtcaccggcggcgtagcccctgccccttccggggtgacgatggagggcggcgcagtgttgaacgatgcgtcacagctgccgcatcaccgcattgtaaccgacgcggtccacagcgagggcggcaaaatcgccctgcaaattctgcatactggacgctacagctatcagccgaacctggttgccccctcggctattcaggcgccgattaaccgctttactccccatgccctcagccacgacgagatcctggccctgattgacgacttcgcccgctgcgcggcgctggcgcgggaagcgggctacgacggggtggaggtgatgggctcggaagggtatctgatcaacgaattcctcgccgcacgcaccaaccagcgcgacgacgaatggggtggcgactatgcccgccggatgcgttttgccgtggaggtggtgcgtgcggtgcgtgaacgtgcgggtgcggattttattatcatcttccgcctgtcgatgcttgacctggtggagggcggcggcaccttcgacgaaaccgtgcagctggcgcaggcgattgaagccgctggcgccaccatcatcaacaccgggattggctggcacgaagcgcgcatcccgaccatcgctacgccggtgccgcgcgcggcgttcagctgggtaacgcgcaagctgaaaggcatagtctccgttccactggtcaccaccaaccgcattaacgatccgcaggtggcggaggatgtgatctcacgcggcgatgccgatatggtatcgatggcgcgcccgttcctcgcggatgccgaactgctctccaaagcgcaaagcggccgtgcggacgagattaatacctgcattggctgcaaccaggcgtgtctggatcagatcttcgtcggcaaggtcacctcctgcctcgttaacccccgcgcctgccatgaaaccaaaatgccgatcgttcctgcggtcaacaagaagcgtctggccgtggtgggtgcagggccggcgggcctggcgtttgcagtcaatgccgcctcgcgcgggcacagcgtgacgctgtttgatgcgctggcggaaatcggcgggcagtttactatcgccagacagatccccggcaaagaggagttctacgaaacgctgcgctattaccgccggatgatcgaggtgacgggcgtcgatctgcggcttaaacagtttgtcagcgcggcggatctgatcggtttcgacgaggtgatcctcgcgagtgggatcgccccgcgcacgcctgcgatcgaaggcatcgatcatccgaaggtattgagctatctggatgtattaagggacaaagcgccggttggcgagaaggtggcgatcatcggctgcggcgggatcggttttgataccgcgatgtatttaagccagccgggcgaagccaccagccagaacatcgctgagttctgcgtggaatggggcattgataccagcctcagtcagtccggtggtttacgcccggaaggtccgcagctgccgaaaagcccgcgtcagattgtgatgctccagcgtaaagccagcaagccgggtgaaggtctgggaaaaaccacgggctggatccaccgcgccaccctgctctcacgcggggtgaagatgatcccgggggtgagctaccagaagatcgacgacgacgggctgcacgtgctgatcggcggcgaaccgcaactgctgcgcgtggatcatgtgattttgtgcgccgggcaggagccgaagcgggatctggcggatccgctgcgtgaggcgggaaaaacggtgcatttgatcggcgggtgcgatgtggcgatggagctggatgcgcggcgggcaattgcgcaggggacgaagttagctctggcgatctag

SEQ ID NO: 4950 - protein, 673 aa, Enterobacter cloacae
MSRYPSLFAPLDLGFTTLKNRVLMGSMHTGLEERPDGAERLAAFYAERARHGVALIVTGGVAPAPSGVTMEGGAVLNDASQLPHHRIVTDAVHSEGGKIALQILHTGRYSYQPNLVAPSAIQAPINRFTPHALSHDEILALIDDFARCAALAREAGYDGVEVMGSEGYLINEFLAARTNQRDDEWGGDYARRMRFAVEVVRAVRERAGADFIIIFRLSMLDLVEGGGTFDETVQLAQAIEAAGATIINTGIGWHEARIPTIATPVPRAAFSWVTRKLKGIVSVPLVTTNRINDPQVAEDVISRGDADMVSMARPFLADAELLSKAQSGRADEINTCIGCNQACLDQIFVGKVTSCLVNPRACHETKMPIVPAVNKKRLAVVGAGPAGLAFAVNAASRGHSVTLFDALAEIGGQFTIARQIPGKEEFYETLRYYRRMIEVTGVDLRLKQFVSAADLIGFDEVILASGIAPRTPAIEGIDHPKVLSYLDVLRDKAPVGEKVAIIGCGGIGFDTAMYLSQPGEATSQNIAEFCVEWGIDTSLSQSGGLRPEGPQLPKSPRQIVMLQRKASKPGEGLGKTTGWIHRATLLSRGVKMIPGVSYQKIDDDGLHVLIGGEPQLLRVDHVILCAGQEPKRDLADPLREAGKTVHLIGGCDVAMELDARRAIAQGTKLALAI

SEQ ID NO: 4951 - DNA, 396 bp, Enterobacter cloacae
atggctcaaataccagcaggggcagattgtcccggccagttaagccgtaaacagaccggcgacgcgtgggagttaaaggcgcgtcgctggcttgaaggcaaaggactgcgctttgtcgccgccaacgttcgcgggcgcggcggcgagattgacctgatcatgaaagacggtcagaccatcgtgtttgttgaagttcgctaccgacagtcgtcccgttttggcggtgctgccgccagcgtgacgctcgccaaacaacaaaaattattacagactgcccacttgtggcttgcccgccataatgggagttttgatactgtggattgccgtttcgatgtggtagccttcaccggaaatgcgatcgactggcttaaaaacgcgtttggcgaagacgcataa

SEQ ID NO: 4952 - protein, 131 aa, Enterobacter cloacae
MAQIPAGADCPGQLSRKQTGDAWELKARRWLEGKGLRFVAANVRGRGGEIDLIMKDGQTIVFVEVRYRQSSRFGGAAASVTLAKQQKLLQTAHLWLARHNGSFDTVDCRFDVVAFTGNAIDWLKNAFGEDA

SEQ ID NO: 4953 - DNA, 1095 bp, Enterobacter cloacae
atgaaagttaaagtactgtccctcctggtaccagctctgctggtggcaggcgcagcaaatgcggctgaaatttataacaaagacggcaacaaattagatctgtacggtaaagtggatggtctgcactatttctctgatgacgacagtgcagacggcgaccagacctacatgcgtctgggcttcaaaggcgaaactcaggttaacgaccagctgaccggttacggccagtgggaataccagatccagggtaactctggtgagaacgaaaacaactcatggacgcgtgtggcgttcgcaggtctgaaattcgctgatgcgggttcattcgactacggtcgtaactacggcgttgtttacgatgtgacttcctggaccgacgttctgccggaattcggcggcgatacctacggttctgacaacttcatgcagcagcgtggtaacggcttcgcgacctaccgtaaccaggacttcttcggtctggttgatggtctgaacttcgcgttgcagtaccagggtaaaaacggcagcgcaagcggcgaaggccagaccaacaacggtcgtgacgcgctgcgtcagaacggtgatggctacggcggctctctgacctacgatctgggcgaaggcttcgctatcggtacggcagtcaccagttctaaacgtactgctgaccagaacgctgcgggctactacggtgaaggcgatcgcgcagagacctataccggtggtctgaaatacgacgcgaacaacatctacctggctgcacagtatactcagacttacaacgcgacccgtgcgggcgacctgggctgggctaacaaagcgcagaacttcgaagtggttgcgcagtatcagttcgacttcggtctgcgtccatccgtggcgtacctgcaatctaaaggtaaggacctggaaaacggctacggcgaccaggatctgctgaaatatgttgatgttggcgcgacttactacttcaacaaaaacatgtccacctacgttgattacaaaatcaacctggttgatgagaacgacttcactcgcgcagcaggtatcggtactgacgatatcgtcgcgctgggtctggtttaccagttctaa

SEQ ID NO: 4954 - protein, 364 aa, Enterobacter cloacae
MKVKVLSLLVPALLVAGAANAAEIYNKDGNKLDLYGKVDGLHYFSDDDSADGDQTYMRLGFKGETQVNDQLTGYGQWEYQIQGNSGENENNSWTRVAFAGLKFADAGSFDYGRNYGVVYDVTSWTDVLPEFGGDTYGSDNFMQQRGNGFATYRNQDFFGLVDGLNFALQYQGKNGSASGEGQTNNGRDALRQNGDGYGGSLTYDLGEGFAIGTAVTSSKRTADQNAAGYYGEGDRAETYTGGLKYDANNIYLAAQYTQTYNATRAGDLGWANKAQNFEVVAQYQFDFGLRPSVAYLQSKGKDLENGYGDQDLLKYVDVGATYYFNKNMSTYVDYKINLVDENDFTRAAGIGTDDIVALGLVYQF

SEQ ID NO: 4955 - DNA, 219 bp, Citrobacter rodentium
atgaaaaaatgggcagtaattatctcagcagtcggtttagcgtttgcggtatcgggttgcagcagcgactatgtcatgtcaacgaaagatggtcgtatgatcctgaccgatggcaaacccgaagtcgacgacgataccggtctggtgagttaccgcgatcgcgaaggcaatcaaatgcagattaatcgcgacgaagtctcccagatcatcgagcgttaa

SEQ ID NO: 4956 - protein, 72 aa, Citrobacter rodentium
MKKWAVIISAVGLAFAVSGCSSDYVMSTKDGRMILTDGKPEVDDDTGLVSYRDREGNQMQINRDEVSQIIER

SEQ ID NO: 4957 - DNA, 1041 bp, Citrobacter pasteurii
atgcattatcaccgtatcccccacagcgctctggagatcagccaactggggttgggcaccatgacatttggtgaacaaaacagcgaagccgatgcccatgcacaactcgattacgccgtcagccagggcattaacctgattgacgtggcggagatgtaccccgttcctccccgcccggaaacacaaggtcttactgaaacgtatgtcggcaactggctggcgaaacgcggcaatcgcgaaaagctggtcatcgcctccaaagtcagcggcccttcccgtaataacgatgccgggatccgccctaaccagatccttgatcgcaagaatatccgtgccgcgctggatgccagcctcaagcgcctgcaaaccgactatctcgatctttatcaggtgcactggccgcagcgtccgacgaactgcttcggtaagcttggctacacctggaacgaaagtgctccggccgttaccctgctggaaacgctggaagcgctcacggagtgccagcgggcgggtaagatccgctacattggcgtttccaacgagacggcttttggcgtgatgcgctatctgcatctggccgataaacacgatctgccgcgcatagtgaccattcagaacccgtacagcctgctgaaccgcagttatgaagtgggtctggcggaggtgacgcagtacgaagaggtggaactgctcgcctactcctgtctgggcttcggtaccctgacgggcaaatacctgaacggcgcgaaaccggctggtgcgcgtaacacgcttttcagccgcttcacccgctatagcggcgagcagacgcaaaaagccgttgcggcctacgtggatatcgcgaaacgccacggactcgatccggcgcagatggcgctggccttcgtgcgtcgtcagccgtttgtggcgagtaccctgctcggcgcaacgacgatggatcagttgaaaacaaatattgagagtttccatctgaacctgagtgaagaggtattagcggagattgaagcggtgcatcaggtttatacctacccggcaccgtaa

SEQ ID NO: 4958 - protein, 346 aa, Citrobacter pasteurii
MHYHRIPHSALEISQLGLGTMTFGEQNSEADAHAQLDYAVSQGINLIDVAEMYPVPPRPETQGLTETYVGNWLAKRGNREKLVIASKVSGPSRNNDAGIRPNQILDRKNIRAALDASLKRLQTDYLDLYQVHWPQRPTNCFGKLGYTWNESAPAVTLLETLEALTECQRAGKIRYIGVSNETAFGVMRYLHLADKHDLPRIVTIQNPYSLLNRSYEVGLAEVTQYEEVELLAYSCLGFGTLTGKYLNGAKPAGARNTLFSRFTRYSGEQTQKAVAAYVDIAKRHGLDPAQMALAFVRRQPFVASTLLGATTMDQLKTNIESFHLNLSEEVLAEIEAVHQVYTYPAP

SEQ ID NO: 4959 - DNA, 1023 bp, Acinetobacter pittii
atggcgacaattaaggatgtggctcgtctggccggtgtttccgtcgcgaccgtctcccgcgtgatcaacaactcccctaaagcgagtgatgcatcgcgccaggccgtgcaggacgccatggaaaacctgaattatcaccctaacgccaacgcgcgcgcccttgcccagcagtcgacagaaaccatcgggctggtggtcggggatgtatccgatccgtttttcggtgcaatggtcaaagccgtagaacaagtttcttatcacaccggaaatttcctgctgattggtaatggctaccacaatgaacagaaagagcgccaggccattgagcagctgatccgtcatcgctgtgcggcgctggtggtccatgcaaaaatgatccccgacgccgagctgatccatctgatgaaacagatgccggggatggtgattatcaaccgcattattcccggttttgaaacccgctgcgtggcgctcgacgaccgttacggcgcatggctcgcaacccgtcatctgatccagcagggccatacccgaattggttatctgtgctccaaccacccaatttccgatgcggaagatcgccttcagggctattacgacgcgctgcgcgaagccggtctgccgtgcaacgatcgtcttgtggcgtacggagaaccggatgagagtggcggcgagcaggcgatgacggagctgctgggccgcgggcggaatttcaccgccgtggccagctataacgactccatggccgccggcgcaatgggcgtgctgaatgataacgggattgacgtcccggcagaaatttcgctgattggctttgatgatgtgctggtgtcgcgctacgtgcgccctcgcctgaccaccgtgcgctacccgattgtgaccatggcaacgcaggcggcagaactggcgttagcgctggccgagcatcgcccgccaccggaaattacccacctgttcagcccaaccttagtgcgccgtcactcggtggtatcgcccgcggaagccgtgagcgaacagcgatag

SEQ ID NO: 4960 - protein, 340 aa, Acinetobacter pittii
MATIKDVARLAGVSVATVSRVINNSPKASDASRQAVQDAMENLNYHPNANARALAQQSTETIGLVVGDVSDPFFGAMVKAVEQVSYHTGNFLLIGNGYHNEQKERQAIEQLIRHRCAALVVHAKMIPDAELIHLMKQMPGMVIINRIIPGFETRCVALDDRYGAWLATRHLIQQGHTRIGYLCSNHPISDAEDRLQGYYDALREAGLPCNDRLVAYGEPDESGGEQAMTELLGRGRNFTAVASYNDSMAAGAMGVLNDNGIDVPAEISLIGFDDVLVSRYVRPRLTTVRYPIVTMATQAAELALALAEHRPPPEITHLFSPTLVRRHSVVSPAEAVSEQR

SEQ ID NO: 4961 - DNA, 1074 bp, Enterobacter cloacae
atggacaaaaggcttaaaatcaccgaaatcgccgcccggacgcagctctccatcagcaccgtttctcgcgtgctggcggggaaggcaaacaccagcgaaaaagcacgggcaaaggtgctggcgtgcgcgcgggagctgggggtaatggacggcatggcggcggggcgtctgctgcttaacagcctggtggtgtttgccccgcagcgggcgtttgacgagcggtccgacatcttttactaccgcgtcatccagagcgtgagcaaagggctggcctcgcacgaagttcgcctgcgttactgtgcgctggaggagaacgacagcgatgcccagctgtttctggcccgcatgaacgaagtggacacccaggcggcgatcctcctcggtatcgacgatccgcatattcacgatctggcggtagacgtgggcaaaccctgtatgctgattaactgccgggaccgccacatgcgcctgcccgccgtcgcgccggatcatcgcgcgattggcaagcgggcggcggagtacctgttcgagatggggcaccgggaggtgatgaacgtgctgtgcctgcgtcgctacaccatggagctgcgcctgtccgggatccgcgacgcgtggcacggtcataacctcaggttcagcgacaggcgcgacctgctgatggtgtccagcttcagcgccagagagacggagcagctggtaagcgagtggcttcaccagcagaaagggaaggacctgccgacggcgttcctggttggtggcgattttatggcggcggggaccatcagcgcgctgcaaaaccacggtctgcgcgtgccgcatgatgtctcggtgatgagcatcgacggctttaatctcgcggcgattcaggatgtgcccttaaccgcggtacatgttccgcgtgatgagctgggaacggaagcggtgcatatgctccagcagcggctgatgcgcccggatgcgccggtgggaacattgctgctaaacggcacgctgaccgtgcgggagtcggtacggcggatacgtcaggggaaacgacgcaccgccgttgagcgggaagggctgtatgacggttaa

SEQ ID NO: 4962 - protein, 357 aa, Enterobacter cloacae
MDKRLKITEIAARTQLSISTVSRVLAGKANTSEKARAKVLACARELGVMDGMAAGRLLLNSLVVFAPQRAFDERSDIFYYRVIQSVSKGLASHEVRLRYCALEENDSDAQLFLARMNEVDTQAAILLGIDDPHIHDLAVDVGKPCMLINCRDRHMRLPAVAPDHRAIGKRAAEYLFEMGHREVMNVLCLRRYTMELRLSGIRDAWHGHNLRFSDRRDLLMVSSFSARETEQLVSEWLHQQKGKDLPTAFLVGGDFMAAGTISALQNHGLRVPHDVSVMSIDGFNLAAIQDVPLTAVHVPRDELGTEAVHMLQQRLMRPDAPVGTLLLNGTLTVRESVRRIRQGKRRTAVEREGLYDG

SEQ ID NO: 4963 - DNA, 345 bp, Klebsiella oxytoca
atgtatttacgacccgatgaggtggcgcgcgttcttgaaaaagaagggttcaccatggatgaggtaacatcaaaagcgtacggatatcgccgtggtgagaattatgtttacgtcaaccgtgaagcaagaatggggcgtactgctctcattattcacccgacactcaaagacagaagcctgtcatttgctgagcccgcctcggatattaaaacctgcgatcattatcagcaatttccgctctatttaggcggcgagacgcatgaacattatggtattccgcacggtttcagctcgcgtatggcgctggagcggttcctgaaagggctgtttggcgacgtacaataa

SEQ ID NO: 4964 - protein, 114 aa, Klebsiella oxytoca
MYLRPDEVARVLEKEGFTMDEVTSKAYGYRRGENYVYVNREARMGRTALIIHPTLKDRSLSFAEPASDIKTCDHYQQFPLYLGGETHEHYGIPHGFSSRMALERFLKGLFGDVQ

SEQ ID NO: 4965 - DNA, 405 bp, Enterobacter cloacae
gtggataacgtactgcatcagcgtaactggaaacgcgcagcggcattgaccgcgctgtttgcgatcctgctgatcgtcgtggcgccgctgatctccgtctcgctgcaaaaagatcccatgagcgccatgccgggtatgcaccatgacatgagcatgatgtcgatggacgagcatcatggtgatatgccgcattctatgccagttgaccatgcggaagcatgcggctactgcgtgctgttagcgcatgtgccgggcgtgatgctggcgcttatcgttctgctcagcgtggtgttgcagcggctgcgcgtgaaaccgcctcgtcaggcggtcagccactggcactttttcccctggctttaccccgatacccgcgcgccgccgcgtcggtctgctttctccctttaa

SEQ ID NO: 4966 - protein, 134 aa, Enterobacter cloacae
MDNVLHQRNWKRAAALTALFAILLIVVAPLISVSLQKDPMSAMPGMHHDMSMMSMDEHHGDMPHSMPVDHAEACGYCVLLAHVPGVMLALIVLLSVVLQRLRVKPPRQAVSHWHFFPWLYPDTRAPPRRSAFSL

SEQ ID NO: 4967 - DNA, 1371 bp, Enterobacter cloacae
atgactacctgcactccgcgcgcggcatggggaaacctgctgcgtcgcctccatttctatatcgggctgtttgtcggtccgtttatcttcttcgcagcgctgaccggaacgctgtatgtcgccacgccgcagcttgaaaaggcgctgtaccatcatgcactccacacggatgccgtgggtgaggcgcagcctcttgctgaacaaattgccgtggcggaaaaggccgtgggttcagcgctgcgtttacatgctgtacgtccggggctggaagggggcgaaacgacccgcgtgatgtttgccgacccggcgctgggtacctccgagcatcgggctatttttattgatcccaccagccttgagattcgaggggatatgaccgtgtacggcaccagcgggattttaccgctgcgtcagactatcgattatctgcatacctcgctgatgctgggcaacatcgggcggctctatagcgagttagccgcctcgtggatgtgggttgctgccctgggcgggatcgcgctgtggttctacacccgaccgaagcgccgtattaacaatcgtttccagaatcgtcgtcgcctgcatgtgatcttaggctggacgttactggcgggaatgctgttgttctcagtcaccgggttaacctggtcacaatgggccggtggcaacgtcgataagctgcgtgcagagatgaactggctgacgccgcaggtaaacaccaccctttccggtgcgccggaaatgagggatgaacacgccgaacatcgtggtcatcacgggggaatgacgatgcctgaaatgccagtcaaactgtcgctttttgacaacgtattgcaggtcgcccgccagtcagggattgatgcgaacaacgttgagatccgtccggcaagcagggtcgaccaggcctggacggtgacggaaatcgatcgccgctggcctacgcaggttgatgccgttgccgtggatccccactcactgaaggtgctggacagcactcgcttcggggatttcccgctgatggctaaactcacccgctggggcgtggatttccatatggggatcctgtttggtctggcaaatcagctgctgctcatcgcgtttggcgttgcgctgtgtgtgttgattatctggggataccggatgtggtggatgcgtcgccctgcaacgtcagccgcgaacccggtacagacgctctgccaaagctggctggcattgccgctgtggggaaggggagtgtcgttcctgataagcctcctgctggggctggcgttgccggtaatgggcgtcagtctggcggtctttattgtgattgactggctgcgctggcgagcggtttcaggcgtgtcgctcgccggaacatccgttaaatag

SEQ ID NO: 4968 - protein, 456 aa, Enterobacter cloacae
MTTCTPRAAWGNLLRRLHFYIGLFVGPFIFFAALTGTLYVATPQLEKALYHHALHTDAVGEAQPLAEQIAVAEKAVGSALRLHAVRPGLEGGETTRVMFADPALGTSEHRAIFIDPTSLEIRGDMTVYGTSGILPLRQTIDYLHTSLMLGNIGRLYSELAASWMWVAALGGIALWFYTRPKRRINNRFQNRRRLHVILGWTLLAGMLLFSVTGLTWSQWAGGNVDKLRAEMNWLTPQVNTTLSGAPEMRDEHAEHRGHHGGMTMPEMPVKLSLFDNVLQVARQSGIDANNVEIRPASRVDQAWTVTEIDRRWPTQVDAVAVDPHSLKVLDSTRFGDFPLMAKLTRWGVDFHMGILFGLANQLLLIAFGVALCVLIIWGYRMWWMRRPATSAANPVQTLCQSWLALPLWGRGVSFLISLLLGLALPVMGVSLAVFIVIDWLRWRAVSGVSLAGTSVK

SEQ ID NO: 4969 - DNA, 861 bp, Escherichia coli
atgagtcaggcactgaacaatctgctgacattactgaacctggaaaaaatagaagaagggctatttcgcggacagagcgaagatttaggcttacgccaggtttttggcggccaggtcgtggggcaagcgctgtatgccgccaaggagaccgtcccggcagaccgtctggtgcactcgtttcacagctactttttacgccccggtgacagcgctaaaccgattgtttacgacgtggaagttctgcgtgacggtcaaagcttcagcgcccgtcgcgtggcggccatccagcatggcaaacccatcttctacatgaccgcctcgttccaggcgccagagccgggctatgagcatcaaaaaaagatgccgtctgccccgtcgccggacgatctgaaatcggaaaccgaaattgcccgcgctctcgcgcatctgctgccgccgcaggtaaaagagaagtttctgtgcgataaaccgctggagatccgctcggtcgaatttcataacccaatgaaggggcataccgctgagcccgcccgccaggtgtggatccgcgccaacggcagcgtacccgcagatttacgcgtgcatcagtacctgctggggtatgcgtcggatttcaacttcctgccggttgcgctacagccgcacggtgtgggcttcctcgaaaaagggatgcaggtagccacaattgaccattccatgtggttccaccgtccattcgatatgaacgaatggctgctttacagcgtggaaagtacctctgcgtccagcgcgcgcggctttgtacgtggggagttttacactcaggatggcgtgctggtggcttctaccgtgcaggaaggtgtgatgcgtaatcgcgggtga

SEQ ID NO: 4970 - protein, 286 aa, Escherichia coli
MSQALNNLLTLLNLEKIEEGLFRGQSEDLGLRQVFGGQVVGQALYAAKETVPADRLVHSFHSYFLRPGDSAKPIVYDVEVLRDGQSFSARRVAAIQHGKPIFYMTASFQAPEPGYEHQKKMPSAPSPDDLKSETEIARALAHLLPPQVKEKFLCDKPLEIRSVEFHNPMKGHTAEPARQVWIRANGSVPADLRVHQYLLGYASDFNFLPVALQPHGVGFLEKGMQVATIDHSMWFHRPFDMNEWLLYSVESTSASSARGFVRGEFYTQDGVLVASTVQEGVMRNRG

SEQ ID NO: 4971 - DNA, 1272 bp, Citrobacter portucalensis
atgcaccgtcgtacctttataaaagcgttcgccttgtccgcctccgtggtcgccatgggcgtcagttttggcgtccaggccgcagagactattaaagtcgggatcatgcactcactctccggcacgatggccatttcagaaacgcccctgaaagatgtcgccctgatgaccatcgatgaaattaacgccaaaggcggcgtgctcgggaaaaagctggagccggtggtggttgacccggcctccaactggccgctgtttgccgaaaaggcccgccagcttctgagccaggataaggtcgccgtagtgtttggctgctggacctccgtatcgcgtaaatcagttctgcccgtttttgaagagctgaacggtttgctgttctatccggtgcagtacgaaggtgaagagatgtcaccaaacgtcttttataccggtgcggcgcctaaccagcaggcgatcccggcggtggagtacctgatgagcgaggacggcggcagcgcgaaacgcttcttcctgctgggaacggactacgtttacccgcgtaccacgaacaagatcctgcgcgccttcctgcactcgaaaggcgtggaagataaagatattgaagaggtctacaccccgtttggtcatagcgattaccagaccatcgtcgccagtatcaagaaattctctgcggggggtaaaacggcggtggtctccaccatcaacggtgattccaacgtgcctttctataaagagctggcgaaccaggggctgaaagccacggacgtgccggtggtggcgttctcggtgggcgaggaagaactgcgcggcattgataccaaaccgctggtgggtaacctggcggcgtggaactactttgaatccgtcgataacccgaccaaccagacttttgtcgcggcctacaaagcctacgcgaaagcccataagctgccgaatgccgataccgtcgtcaccaacgatccgatggaagcgacctatgtcggcctgcatatgtgggcgcaggcggttgaaaaagcggggacaaccgacgtggacaaagtgcgcgcggcaatggcgggccagtcgttcaacgcgccatccggctttacgctgaccatggatgccaccaaccaccacctgcataagcccgtcatgattggtgaaatcgaaggcaacggccagttcaacgtcgtctggcaaaccgaacagccggtacgcgctcagccgtggagcccgtttatcgccgggaatgacaaaaaacctgaccagccgatgaaaaccgccagcaactaa

SEQ ID NO: 4972 - protein, 423 aa, Citrobacter portucalensis
MHRRTFIKAFALSASVVAMGVSFGVQAAETIKVGIMHSLSGTMAISETPLKDVALMTIDEINAKGGVLGKKLEPVVVDPASNWPLFAEKARQLLSQDKVAVVFGCWTSVSRKSVLPVFEELNGLLFYPVQYEGEEMSPNVFYTGAAPNQQAIPAVEYLMSEDGGSAKRFFLLGTDYVYPRTTNKILRAFLHSKGVEDKDIEEVYTPFGHSDYQTIVASIKKFSAGGKTAVVSTINGDSNVPFYKELANQGLKATDVPVVAFSVGEEELRGIDTKPLVGNLAAWNYFESVDNPTNQTFVAAYKAYAKAHKLPNADTVVTNDPMEATYVGLHMWAQAVEKAGTTDVDKVRAAMAGQSFNAPSGFTLTMDATNHHLHKPVMIGEIEGNGQFNVVWQTEQPVRAQPWSPFIAGNDKKPDQPMKTASN

SEQ ID NO: 4973 - DNA, 453 bp, Citrobacter rodentium
atggtctggataatgctggcaacgcttgccgtggtgtttgtggttggatttcgtgtcctgacctcagactcccgccgcgccatcaaacgtttaagcgagcggctggggatcaccccgatgccggtcgagtcgatgattgaccagttcggtaaaacgccgggcaatgagtttatccgctatcttgaacgccccgacgaggcgcatctgcaaaatgccgcccaggtgctgctgatctggcaggtctgcatcgtcgacgccagcgaagagaatctgcatacctggcaccgcatgctgcgtaaagcccgtctggccgcgccgatcaccgacgcgcaaatccgcctcgcgctcggctttatgcgcgagatagagccagacccgcaggagttcaacgccttccagctgcgctacaaccagcttttcctgccggaagagggcgtgttttacctgcaatga

SEQ ID NO: 4974 - protein, 150 aa, Citrobacter rodentium
MVWIMLATLAVVFVVGFRVLTSDSRRAIKRLSERLGITPMPVESMIDQFGKTPGNEFIRYLERPDEAHLQNAAQVLLIWQVCIVDASEENLHTWHRMLRKARLAAPITDAQIRLALGFMREIEPDPQEFNAFQLRYNQLFLPEEGVFYLQ

SEQ ID NO: 4975 - DNA, 633 bp, Enterobacter cloacae
atgcttcgatacgagttaacgccgaacaatgcaggttttatactgtggggagattcagaagccctgaatgaattacatgaactcattcattacatcgtggatgaaagcccactgattaaagttaaagacggatttatgttatcccttgcctatgatattcgtaaagcacgggaaggtaatcgtcgtgttgagcaacatcagtatgatcaacatgatacatataagctttatggtgttgagcttttatggcctctggtcctggtacagtcctcaatactcagaaactcaatgggttatattcagacagacaaaaaccagctgtctgtcatgtatgcctttgaatacctgatagaatcagcattaacagagtctgagagaacaacgtcgaatgatattatgctaacagtaaaatatgcatcagactctgattttaatttcattgaggataatattgacagcaggtgctgctattttatcagcctatctccggagcaaagaaaaaagcagttaatcagtattgttcgttcttttcattcattatggggtaagtatgcccgtgaaaagcaggacataaagatgctgaacgaaatgaataatacatcatgggtctggccggacaatatcaactggtga

SEQ ID NO: 4976 - protein, 210 aa, Enterobacter cloacae
MLRYELTPNNAGFILWGDSEALNELHELIHYIVDESPLIKVKDGFMLSLAYDIRKAREGNRRVEQHQYDQHDTYKLYGVELLWPLVLVQSSILRNSMGYIQTDKNQLSVMYAFEYLIESALTESERTTSNDIMLTVKYASDSDFNFIEDNIDSRCCYFISLSPEQRKKQLISIVRSFHSLWGKYAREKQDIKMLNEMNNTSWVWPDNINW

SEQ ID NO: 4977 - DNA, 987 bp, Klebsiella oxytoca
atgatgaccctcatcaccattaaccgcgtgtattacctgatcggcttcgtcgtgatgctgctggttgtgatgacccttcgcgaccgcgctaacccgaaacgctataccacggcgctgttctggtttctgttcggcgggatcttcctgtttggcgatctgatggtgcaggagctgggtaagtcgctggcgtatcgcattattggcggcgccgttatcgtgattgcgctgctggccggtttcgggctggtcgggaaggggcactataaaatgtccaccgaggaggagcgtgttgcctcgtcgaaccggctgaaaaactggctgtttttaccggcactgatgatccccgtggtaacggtcatcgggacgctgtttctgaaaggcgtgtcgattggcggcgtttatctgctcgaccagaaacagcttacgctggcggcgctgtgcgtggcatgcgtggcggctatccttaccggctggtggctgacaaaaggtacgccgctgcatgcggtgcgtcagtcgcgtcggctggtcgataccattggctgggcggtgatcctgccgcagatgctcgccatgcttggcggcgtgtttgtggtggcgaataccggagaatcggtacaaaaggtggtcagcctgtttgttaacccggacagccgcttcatgctggtggtcatttactgcgtggggatggcgctgtttaccatgatcatgggtaacgccttcgcagccttcccggtgttaagcgccggtatcgctctgccattcctgattaacgtccatcacggtaacccggcgccgctgctggctatcggtatgtacgctggctattgcggcacgctgatgacgccgatggccgccaacttcaacattgtgcccgccgcgctgctggagctaaaagacaaatatcaggttatcaagatccagatcccgaccgcgttaaccctgctggtggtgaacgtgttcttaatgtatttcctcgtgtttcgctaa

SEQ ID NO: 4978 - protein, 328 aa, Klebsiella oxytoca
MMTLITINRVYYLIGFVVMLLVVMTLRDRANPKRYTTALFWFLFGGIFLFGDLMVQELGKSLAYRIIGGAVIVIALLAGFGLVGKGHYKMSTEEERVASSNRLKNWLFLPALMIPVVTVIGTLFLKGVSIGGVYLLDQKQLTLAALCVACVAAILTGWWLTKGTPLHAVRQSRRLVDTIGWAVILPQMLAMLGGVFVVANTGESVQKVVSLFVNPDSRFMLVVIYCVGMALFTMIMGNAFAAFPVLSAGIALPFLINVHHGNPAPLLAIGMYAGYCGTLMTPMAANFNIVPAALLELKDKYQVIKIQIPTALTLLVVNVFLMYFLVFR

SEQ ID NO: 4979 - DNA, 723 bp, Klebsiella oxytoca
atggacagttctacactgttgccacttatcgggattccggtggtggttattggttttgcactgcgtttcaacccgctgctggttgtcgtggtggcggggctggcgacgggcctgctggttggcatggatttcggtatgctgctggaaacctttggcgaaaagtttgtgaatagccgatcgcttgccaccttcattctgatcctgccggtgattggcctgctggagtattacgggctgaaagagcgcgcccaggcctgggtcgcgaagatcgccagcgccacctcggcgcgtatcctgatgctctactttgtcgcccgcgaagggacggctgcgctgggcctgatgtcccttggcggccacgcgcaaacggtgcgtccgctgctggcgccgatggcggaaggggcggccctgaatgaatacggcgaactgccgcagactatccgcgacaaaatcaaagcccatgccgccgcgtgtgacaatatcgcggttttctttggggaagatatctttatcgcctttggcgcggtactgctgattgatgcgttcctgaaagagaacgggatcgaggggatcgaaccgctgcatatcggcctgtgggccattccgaccgctattgcggcactgatcatccatatgacgcgtctgctgcgcctcgacgccagcattcgtcgcgacgtgatggcctggaaagcagagcagggtacgcaggagatcgcaccatga

SEQ ID NO: 4980 - protein, 240 aa, Klebsiella oxytoca
MDSSTLLPLIGIPVVVIGFALRFNPLLVVVVAGLATGLLVGMDFGMLLETFGEKFVNSRSLATFILILPVIGLLEYYGLKERAQAWVAKIASATSARILMLYFVAREGTAALGLMSLGGHAQTVRPLLAPMAEGAALNEYGELPQTIRDKIKAHAAACDNIAVFFGEDIFIAFGAVLLIDAFLKENGIEGIEPLHIGLWAIPTAIAALIIHMTRLLRLDASIRRDVMAWKAEQGTQEIAP

SEQ ID NO: 4981 - DNA, 348 bp, Citrobacter freundii
atggctctgatccccaaaaactacgcacggctggaaagcggctaccgtgaaaaagcgctaaaaatctacccctgggtttgtggacgctgctcgcgtgagtttgtttattcaaatcttcgtgaactcacggttcaccatatcgaccacgatcacaccaataacccggaagatggcagtaactgggagctgttgtgcctgttttgtcacgatcacgaacactcaaagtacaccgaagcggatcagtatggcaccaccgttgtcgcgggtgaggatgcgcaaaaagacgtgggtgtcgccacgtttaacccctttgccgatctcaaggcgatgatgaacaagaagaagtaa

SEQ ID NO: 4982 - protein, 115 aa, Citrobacter freundii
MALIPKNYARLESGYREKALKIYPWVCGRCSREFVYSNLRELTVHHIDHDHTNNPEDGSNWELLCLFCHDHEHSKYTEADQYGTTVVAGEDAQKDVGVATFNPFADLKAMMNKKK

SEQ ID NO: 4983 - DNA, 951 bp, Raoultella ornithinolytica
atggcaaagtatcaaaacatgctggtggctatcgatcctaatcaggacgatcagccggcattacgacgtgctgtgtatttacatcaacggattggtggcaaaattaaagcctttttgccgatttatgacttctcatacgagatgaccacccttctgtcgcctgacgagcgcaccgctatgcgtcagggagtgatcagccagcgtaccgcgtggatccgcgagcaggcgaaatattacctggaagcgggcgtaccgattgatatcaaagtggtctggcacaaccgacctttcgaagccattattcaggaagtggtggccggtgggcatgacctgctgctgaaaatggcgcaccagcatgacaaactggaatctgtgattttcactccaaccgactggcacctgctgcgcaaatgcccttgcccggtatggatggtgaaagatcagccatggcctgagggcgggaaagccgtcgtggcggtgaatctggccagcgaagaggattatcacaattcgctgaacgagaagctggtgaaggaaaccatccagcttgccgaccaggttaaccacaccgaagtccatctggtgggtgcctatccggttacgccaatcaatatcgccatcgagttgcctgaatttgacccgagcgtgtataacgacgcgattcgcggtcagcatctgctggccatgaaagcgctgcgccagaaattcagtatcgatgagaatatgacgcacgtagaaaaagggttaccggaagaggttattccggatctggcggagcatttgcaggccgggattgtggtgctgggcaccattggccggaccggtatctctgccgcgttcctgggaaataccgccgagcaggtgatcgaccacctgcgctgcgaccttctggtcatcaaaccggatcagtatcaaacgccggttgaactggacgatgaggaagacgattga

SEQ ID NO: 4984 - protein, 316 aa, Raoultella ornithinolytica
MAKYQNMLVAIDPNQDDQPALRRAVYLHQRIGGKIKAFLPIYDFSYEMTTLLSPDERTAMRQGVISQRTAWIREQAKYYLEAGVPIDIKVVWHNRPFEAIIQEVVAGGHDLLLKMAHQHDKLESVIFTPTDWHLLRKCPCPVWMVKDQPWPEGGKAVVAVNLASEEDYHNSLNEKLVKETIQLADQVNHTEVHLVGAYPVTPINIAIELPEFDPSVYNDAIRGQHLLAMKALRQKFSIDENMTHVEKGLPEEVIPDLAEHLQAGIVVLGTIGRTGISAAFLGNTAEQVIDHLRCDLLVIKPDQYQTPVELDDEEDD

SEQ ID NO: 4985 - DNA, 1530 bp, Escherichia coli
atgcgtattggggtaccaaaagaacggttagccaatgaaacccgcgtagcggcaacaccaaaaacggtggagcaactgcttaaactgggttttaccgtcgcgattgaaagcggcgcgggcaaactggcgagtttcgatgacgaggcctttactcaggctggcgcggacgtagtggacggtgctgaggtctggcaatcacccatcattctgaaggtcaacgcaccggaagagagtgaaattgaactgctgaacgcgggcactacgcttgtgagctttgtctggccagcccaaaacccggagctgatggagaagctggcagcacgcggtgtcaccgtgatggcgatggactccgtgccgcgtatttcgcgcgcgcagtctctggatgcgctgagctccatggcgaacattgccggctatcgcgccattgtcgaagctgcgcatgagtttggtcgcttctttacaggtcagattacggcggcaggtaaagtaccacccgcgaaggtgatggtgattggtgccggtgtggcaggtcttgccgctatcggggccgcaaacagcctgggcgctattgttcgcgcgtttgatacccggccggaagtgaaggagcaggtgcagagtatgggcgccgaattccttgagctggacttcaaggaagaagcgggcagcggtgatggttacgcgaaggtcatgtctgaagcctttattaaggcggaaatggcgctctttgcggcgcaggcaaaagaggtggacatcattgtcaccaccgcgcttattccgggtaaaccggcgccgaagctgatcacccgtgagatggtggattccatgcagccgggcagcgttattgtcgatctggcggcgcaaaacggcggtaactgtgagtataccgtgccaaaccaggtcacgacgaccgcgaacggcgtgaaggtgatcggttataccgacctgccagggcgtctgccaacccagtcctctcagctgtacggcacgaacctcgttaacctgctgaagctgctctgcaaagagaaagacggcaacattaccgttgattttgatgatgtggtggtgcgtggcgttaccgtggtgcgtgaaggggaaatcacctggcctgcaccgccgattcaggtttccgctcaacctcaggctgcgccgaaagcggcgccagagcccgcggagccagcaaaacctgcgtcgccgtggcgcaaatacgccatcatggcgctggttattatcctgtttggctggctggcggatgtcgcgccaaaagagttccttggccacttcaccgtcttcgcgctctcctgcgtggtgggttactacgtcgtgtggaacgtttctcatgcgctgcataccccgctgatgtcggtcaccaatgccatctccgggattatcgtggtcggggcattgctgcaaattggtcatggcggctggatcagcttcctgagcttcattgcggtgctgatcgccagtatcaatattttcggtggtttcaccgtgactcagcgcatgctgaaaatgtttcgtaaaggctaa

SEQ ID NO: 4986 - protein, 509 aa, Escherichia coli
MRIGVPKERLANETRVAATPKTVEQLLKLGFTVAIESGAGKLASFDDEAFTQAGADVVDGAEVWQSPIILKVNAPEESEIELLNAGTTLVSFVWPAQNPELMEKLAARGVTVMAMDSVPRISRAQSLDALSSMANIAGYRAIVEAAHEFGRFFTGQITAAGKVPPAKVMVIGAGVAGLAAIGAANSLGAIVRAFDTRPEVKEQVQSMGAEFLELDFKEEAGSGDGYAKVMSEAFIKAEMALFAAQAKEVDIIVTTALIPGKPAPKLITREMVDSMQPGSVIVDLAAQNGGNCEYTVPNQVTTTANGVKVIGYTDLPGRLPTQSSQLYGTNLVNLLKLLCKEKDGNITVDFDDVVVRGVTVVREGEITWPAPPIQVSAQPQAAPKAAPEPAEPAKPASPWRKYAIMALVIILFGWLADVAPKEFLGHFTVFALSCVVGYYVVWNVSHALHTPLMSVTNAISGIIVVGALLQIGHGGWISFLSFIAVLIASINIFGGFTVTQRMLKMFRKG

SEQ ID NO: 4987 - DNA, 1029 bp, Enterobacter cloacae
atggctgtagcgaaaaagatcaccatcaacgatgtcgcgctggcggcgggggtttccgtcagcaccgtttcgctggtattgagcgggaaggggcgcatctctcctgcaacgggtcagcgcgtcaacgaggccgttgagcagttaggctttgtgcgtaatcgccaggcgtcggcgttgcgcggtgggcaaagcggggtgatagggctgatcgttcgcgacctcacgtcgccgttttatgcagaactgaccgccgggcttaccgagtcgcttgaagcgcaggggcgaatggttttcctgctccacggtgggcgcgaaccggagcagctgctctccaggctggatatgctgctgacgcaaggggtggatggggtgatcgtggccggcgcgtccggcgtgggcagtgaattgtgtgagcgcgcggcgcagaaaggcgtaccgctggtgtttgcctcgcgcgccagctatctcgacgaagccgatacccttcggccagataacatgcaggccgcgcaaatgctgaccgagcatcttattcatcgcggccatcagcgcatcgcctggctcggcggtaaaagctcttccctgacgcgtgccgagcgggtgggcggttactgctccacgctcatcaaatacggcctgccgtttcacagcgaatgggtggtggagtgtgaatccagccagaaaaaagccgcggaagccatcggcacgctgcttcgcaacagcccgacgatcagcgcggtgatttgctataacgacgtcattgcgatgggggcgtggttcggtttgatccgcgccggacgccagagcggtgagggcggggtagaaacgttcttcggccatcaggtggcgctgggggcgtttgcggatgtcggtgaaaatgcattagacgatctccccatcgtctgggcgacgacgccggctcgtgagatggggtacaccctggcagacaggatcatgcagcgcattgaaaatacggacgtgcaggccgggcatcagattgtggctgcgcggttagtgacggtgaagtaa

SEQ ID NO: 4988 - protein, 342 aa, Enterobacter cloacae
MAVAKKITINDVALAAGVSVSTVSLVLSGKGRISPATGQRVNEAVEQLGFVRNRQASALRGGQSGVIGLIVRDLTSPFYAELTAGLTESLEAQGRMVFLLHGGREPEQLLSRLDMLLTQGVDGVIVAGASGVGSELCERAAQKGVPLVFASRASYLDEADTLRPDNMQAAQMLTEHLIHRGHQRIAWLGGKSSSLTRAERVGGYCSTLIKYGLPFHSEWVVECESSQKKAAEAIGTLLRNSPTISAVICYNDVIAMGAWFGLIRAGRQSGEGGVETFFGHQVALGAFADVGENALDDLPIVWATTPAREMGYTLADRIMQRIENTDVQAGHQIVAARLVTVK

SEQ ID NO: 4989 - DNA, 945 bp, Escherichia coli
atgttatccgccatcacgcggctgttcccgttatgggcgctgctgctctccgtactcgcgtattacactcccaccacgttcacgggcattggtccgtgggtcaccacgctgctgatgctgattatgttcggcatgggcgtgcatctgaaaattgatgatttcaaacgcgtgctgtctcgcccggcgccggttgccgcagggattttcctgcactacctggtgatgccgctcgcggcctggctgctggcgatggcctttaagatgccgcccgacctttccgccgggatggtgctggtggggagcgtagccagcggtacggcatctaacgtcatgatctatctggcgaaaggcgacgtggcgctctccgtcaccatctcgtcggtttccacgctggtgggcgtgattgccacgccgctgttaacccgcctgtatgtggacgcgcatatccaggtggacgtgatgggcatgctgctcagcatcctgcaaatcgtggtgatcccgattgcgctggggctggtgatccaccatctcttcccgcgggtggtgaaagcggttgagccgtatctgcccgcgttttcgatggtctgcattctggccattatcagcgccgtggtagccggttccgcatcgcacatcgcttcggtgggctttgtggtgatcgtcgcggttgtgctgcataacactattggtctgctgggcggttactggggcggaaagctgtttggctttgacgaatccacctgccgcacgctggcgatcgaagtggggatgcagaactccggcctggcggcggcgctgggtaaaatttacttctcaccgctggcagcgctaccgggggcgctgttctccgtctggcacaacctgtccggttcgctgttagcaggatactggtccggtaagccgattgatgaccaaccgaaaaaagatgcggtgaaacagggttaa

SEQ ID NO: 4990 - protein, 314 aa, Escherichia coli
MLSAITRLFPLWALLLSVLAYYTPTTFTGIGPWVTTLLMLIMFGMGVHLKIDDFKRVLSRPAPVAAGIFLHYLVMPLAAWLLAMAFKMPPDLSAGMVLVGSVASGTASNVMIYLAKGDVALSVTISSVSTLVGVIATPLLTRLYVDAHIQVDVMGMLLSILQIVVIPIALGLVIHHLFPRVVKAVEPYLPAFSMVCILAIISAVVAGSASHIASVGFVVIVAVVLHNTIGLLGGYWGGKLFGFDESTCRTLAIEVGMQNSGLAAALGKIYFSPLAALPGALFSVWHNLSGSLLAGYWSGKPIDDQPKKDAVKQG

SEQ ID NO: 4991 - DNA, 1017 bp, Salmonella enterica
atgaactacaaagccgttgccgcgctggccttcaccagcatgttcagcatcagcaccctgctaagccctgcttacgctgaggaacaggaaaaagcgctgaactttggcatcatttcaacggaatcacagcaaaacctgaagccgcagtgggaaccgttcctgaaagatatggaaaccaaactggggatcaaagtaaacgccttcttcgccccggactacgcgggcatcattcagggaatgcgcttcaacaaagtcgacatcgcctggtatggcaacctctctgctatggaagcggtagatcgcgcgaacggccaagtcttcgcccagaccgttgcggcagacggctccccgggctactggagcgtgctgatcgttaacaaagacagcccgatcaacaatctcaacgacatgctcgccaaacgcaaagagctgacctttggtaacggcgacccgaactccacttccggcttcctcgtccctggctattacgtcttcgcgaaaaacaacgtctccgccagcgactttaagcgcacggtcaacgccagccacgaaaccaacgccctggccgtggcgaataagcaggttgacgtcgccaccaacaacactgaaaacctcgacaagctgaagacctccgcgccggacaagctgaaggaaatcaaggttatctggaaatcgccgctgatcccgggcgacccgatcgtgtggcgcaaaaacctctctgagaataccaaggacaaggtctacgacttctttatgaactacggcaaaacgccggaagagaaagcggttctggcgcgtctgggctgggcgccgttccgcgcgtccagcgatttgcagctggtgccgattcgccagctggcgctgttcaagcagatgcagggcgtgaaggacaacaagggtctgaaggaagaagagaagaccagcaaagtgtcggaaattcaggcgcagctggacgatctcgaccgcctgaccgccgcgctcggcgccatgaccagcgtgaataaagcggtgcagtaa

SEQ ID NO: 4992 - protein, 338 aa, Salmonella enterica
MNYKAVAALAFTSMFSISTLLSPAYAEEQEKALNFGIISTESQQNLKPQWEPFLKDMETKLGIKVNAFFAPDYAGIIQGMRFNKVDIAWYGNLSAMEAVDRANGQVFAQTVAADGSPGYWSVLIVNKDSPINNLNDMLAKRKELTFGNGDPNSTSGFLVPGYYVFAKNNVSASDFKRTVNASHETNALAVANKQVDVATNNTENLDKLKTSAPDKLKEIKVIWKSPLIPGDPIVWRKNLSENTKDKVYDFFMNYGKTPEEKAVLARLGWAPFRASSDLQLVPIRQLALFKQMQGVKDNKGLKEEEKTSKVSEIQAQLDDLDRLTAALGAMTSVNKAVQ

SEQ ID NO: 4993 - DNA, 1065 bp, Escherichia coli
atgtacgttgccgtcaaagggggcgagaaggcgatcgccgccgcccatgccttgcaggcgcacagacgccggggggatgacgcccttcccgagctgagcgtcgcccagattgaacagcagttaaacctggccgtcgaccgcgtgatgaccgaaggcggcatcgcggaccgcgaactggcggcgctggcgctgaaacaggccagcggcgataacgtggaagccatcttcctgctgcgcgcttaccgcactacgcttgcgaagctggcggttagcgagccggtgaatacggcggaaatgcgattagagcgccgtatttctgcggtgtacaaagatattcctggcggccagctgcttggtccgacctacgactacacccatcgcctgctggacttcactctgctggcgaacggtgaaacaccgcagctcagcgtctctgacgctgaacaagacgcctccccgcacgtctttagcctgctggcaaaccaggggctggcgaaggcggaggaggacaccggcagcacaccggatgacatcacccgcacgccgccggtctatccctgttcgcgctcgtcccgcctgcaacagctgatgcgcggtgacgaagggtatctgctggcgctggcctactccactcagcgcggctatgggcgcaaccaccccttcgcggcagagatccgcagcggttatatcgacattgaaatcgtgccggaagagctgggttttgcggtgaacatcggcgaactgctgatgaccgagtgcgaaatggtcaacggttttgtcgcgccagagaatgaagatccgcactttacccgcggctacgggctggtgtatggcctgagcgagcgcaaggcgatggcgatggcgctggttgaccgtgcgctccaggcgccggactacggcgagcatattgcaggcccggcacaggacgaagagttcgtgctggcccacgcggataacgttgaggccgccggctttgtctcgcacctcaagctgccgcactacgtcgatttccaggccgaactggaactgctgaaacgcctgcaacgggagcgcgccaatggctaa

SEQ ID NO: 4994 - protein, 354 aa, Escherichia coli
MYVAVKGGEKAIAAAHALQAHRRRGDDALPELSVAQIEQQLNLAVDRVMTEGGIADRELAALALKQASGDNVEAIFLLRAYRTTLAKLAVSEPVNTAEMRLERRISAVYKDIPGGQLLGPTYDYTHRLLDFTLLANGETPQLSVSDAEQDASPHVFSLLANQGLAKAEEDTGSTPDDITRTPPVYPCSRSSRLQQLMRGDEGYLLALAYSTQRGYGRNHPFAAEIRSGYIDIEIVPEELGFAVNIGELLMTECEMVNGFVAPENEDPHFTRGYGLVYGLSERKAMAMALVDRALQAPDYGEHIAGPAQDEEFVLAHADNVEAAGFVSHLKLPHYVDFQAELELLKRLQRERANG

SEQ ID NO: 4995 - DNA, 756 bp, Klebsiella oxytoca
atgaaaccgctgctttcggttaataacctgactcacctttatgcgccgggcaaaggctttagcgacgtgtcgtttgagctgtggccgggcgaagtgctgggcattgtcggcgagtccggctccggtaaaaccaccctgctgaagtccatctccgcgcgcctgacgccgcagaatggcgacattttgtatgagggcgtgtcgctgtatggcatgagtgaagccgatcgccgccgcctgctgcgcaccgagtggggcgtggtgcaccagcacccgatggatggcctgcgccgccaggtgtcggcggggggcaacatcggcgaacggctgatggccaccggcgcgcgccactacggcaacatccgcgccacggcgcagcactggctggaagaggttgaaattcccgcctcgcgcatcgacgacctgccgaccaccttctccggcggcatgcagcagcgtttacagattgcccgcaatctcgtcacccatccgaagctggtgtttatggatgaaccgaccggcgggctggacgtctctgtacaggctcgcctgctcgacctgctgcgcggcttggtggtggagctaaacctggcggtggtgattgtcacccacgatttaggcgtcgcgcgcctgctggcagaccgcttgctggtgatgaagcagggtcaggtggtggaaagtgggttaaccgaccgcgtgctcgacgatccccatcatccgtatacccagctgctggtgtcgtccgtattgcagaactga

SEQ ID NO: 4996 - protein, 251 aa, Klebsiella oxytoca
MKPLLSVNNLTHLYAPGKGFSDVSFELWPGEVLGIVGESGSGKTTLLKSISARLTPQNGDILYEGVSLYGMSEADRRRLLRTEWGVVHQHPMDGLRRQVSAGGNIGERLMATGARHYGNIRATAQHWLEEVEIPASRIDDLPTTFSGGMQQRLQIARNLVTHPKLVFMDEPTGGLDVSVQARLLDLLRGLVVELNLAVVIVTHDLGVARLLADRLLVMKQGQVVESGLTDRVLDDPHHPYTQLLVSSVLQN

SEQ ID NO: 4997 - DNA, 681 bp, Escherichia coli
atgatccacgttgaaaatgtcagtaaaacctttgtgctccaccagcaaaacggcgtccccctgccggtactgcaaaatgcctcgttagaggtcagcaacggcgaatgcgtggtgctgcatggccattccggcagcggaaaatccaccctgctgcgctccctgtatgccaactacctgccggacgaaggccatattcatattcgccataacaatgaatgggtcgatctggttcaggctcccgcgcgcaaagtgctggaagtgcgccgctcgacgatcggctgggtcagccagttcctgcgggtgatcccgcggatctccgccctggacgtggtcatgcaacccctgctggatctcggcgtgccgcgcgaaacctgcgccgctaaagccgccagcctgctgacgcgcctcaacgtaccggagcgtctgtggcacctcgccccgtcgaccttttccggcggcgagcagcagcgcgtcaacatcgcccgcggctttatcgtcgattacccgattttactcctggatgaacccaccgcctcgctcgacagtaagaacagcgcagcggtgatggaactgatcgaacaggccaaagcgcgcggcgcggcgatcgtcgggatcttccacgacgacgccgtacgccaacgcgtggcggacagactgcacccgatggggacaaacgtatga

SEQ ID NO: 4998 - protein, 226 aa, Escherichia coli
MIHVENVSKTFVLHQQNGVPLPVLQNASLEVSNGECVVLHGHSGSGKSTLLRSLYANYLPDEGHIHIRHNNEWVDLVQAPARKVLEVRRSTIGWVSQFLRVIPRISALDVVMQPLLDLGVPRETCAAKAASLLTRLNVPERLWHLAPSTFSGGEQQRVNIARGFIVDYPILLLDEPTASLDSKNSAAVMELIEQAKARGAAIVGIFHDDAVRQRVADRLHPMGTNV

SEQ ID NO: 4999 - DNA, 324 bp, Citrobacter rodentium
atgaaacgttactctaccgctctgttattgggtctgctgactttaaccagccaactggcgcatgccgatgtgattgatgatgccattggcaatattcagcaggcgatcaacgacgcctataaccccggcagcagccgtaatgatgacgacgacgatcgttacgatcgcagccgtcaaaccgacagccgccagtacgacgatcgtcgtcgacagttagaagatcgacgccagcgtttagacgagcgtcagcggcagctggatgacgatcggcgtcggttagaagaggatgagcgccggttagaggatgattacgatcggtggtaa

SEQ ID NO: 5000 - protein, 107 aa, Citrobacter rodentium
MKRYSTALLLGLLTLTSQLAHADVIDDAIGNIQQAINDAYNPGSSRNDDDDDRYDRSRQTDSRQYDDRRRQLEDRRQRLDERQRQLDDDRRRLEEDERRLEDDYDRW

SEQ ID NO: 5001 - DNA, 942 bp, Klebsiella oxytoca
atgagattgaagcccttagtgaccgcgctctgtgctggcgcgctgctggccgcaaccccgtttgcgcaggcaaaagatctgaagtccatcggcgtgacggtgggcgacctggctaacccgttcttcgtgcagatcaccaaaggtgccgagctggaagcgcgcaagctggcgggagataacgtcaaggtgacgctggtctccagcgggtacgatctgggccagcaggtatcgcagatcgataacttcattgccgcgaaagtggacatgatcatcctcaacgccgcggattctaaagggatcggcccggcggtaaaacgcgccaaagaggcggggatcgtggtcgtggcggttgacgtggcggcggaaggggccgatgccaccatcacctctgataacacccaggcgggggagatggcctgtaagtacataaccgaccgtctgaaaggtaaaggcaacgtggtgatcatcaacgggccgccggtttctgcggtacaaaaccgcgtggagggctgccagaccgagttcaggcgccacccggatatcaaagtgctctcggataatcagaacgccaaaggcagccgcgaaggcggactggaggtcatgacctccctgctggcggccaatccgaagatcgacggcgtattcgcaattaacgatccgacggcgatcggcgccgatctggcggcgaaacaggctcaacgtaatgagttctttatcgttggcgtggatggcagcccggacggtgaagaagccctgaagcgcgaaaactccctgtttgtggcgacaccggcgcaggatccgcaggtgatggcggcgaaggcggtggagattggctatgacattctccagggcaaacctgcgccgaaagagcctgtgctgatcccggtgacgatgatcgataaaaagaacgtcggcacgtataaggggtggacggttaagtaa

SEQ ID NO: 5002 - protein, 313 aa, Klebsiella oxytoca
MRLKPLVTALCAGALLAATPFAQAKDLKSIGVTVGDLANPFFVQITKGAELEARKLAGDNVKVTLVSSGYDLGQQVSQIDNFIAAKVDMIILNAADSKGIGPAVKRAKEAGIVVVAVDVAAEGADATITSDNTQAGEMACKYITDRLKGKGNVVIINGPPVSAVQNRVEGCQTEFRRHPDIKVLSDNQNAKGSREGGLEVMTSLLAANPKIDGVFAINDPTAIGADLAAKQAQRNEFFIVGVDGSPDGEEALKRENSLFVATPAQDPQVMAAKAVEIGYDILQGKPAPKEPVLIPVTMIDKKNVGTYKGWTVK

SEQ ID NO: 5003 - DNA, 2040 bp, Enterobacter cloacae
atgaccaaaagactgacttgggagcagaaaagtattgtcagccatgacaccggacatgcgttggtaaaagccgtacctggtagcgggaaaacaaccacacttgtaaagcgcgttgagcggctggtcaagacgggaactgatcctcgctccattctgatcctgatgtacaacaagtcggcgcaggtgagcttcacggagaacttgaagacggcactgatgtcgagcgtgattccagaaatccgcacgttccacagcttggccttaaagattgttggttacggagaacgccaacagataatcaagaagaaagacctcattactccaagcgactaccgctatgagcaactggtaaagcaagcctaccgctatggctttgaccatgaggcgaattatattgaccccaatgaaattgaaaacttcgagctgtttattgctcgctgccgggcggcggccgtaactcctgttgatgctgccaatgatccaacgttcagcaacatcaaacgggagtttattcacgcctatggccgctattgtgagctgctggaggaaaacagtctgcgaacctttgatgactgtttgattgaggctgtcgcactgttgcgtaatgacagcagccttggtgcccacttcaagcacatcattgttgatgaatatcaggacgttaacctgatacagcatgacatgacccgcttgctatctaagtcggatacgtcggttatggctgttggtgatgttaaccagtgtatttatgagtggcgtggtgctcgaccagactttatcggcggactgtttgaaaggcactacccgaatacgaaggtgtttcaactgtcatgcacgttcagatttggccatgagctttccttgatggctaactcggtaattcggcgcaactctacaaagctgaccaagctttgtgtcagtcatcctagcacccccaaaacagaggtcagattgcactttgataactgcctatccaaggtgctatcaaacctctcggtgagcagtggaacacaagccatattgtcccgcactaaggcgaaccttgctgaggcggaaattgctttacgcctgtgtgggctaccttatcgctacctcaatggttcaagcgcattacacacccgcaccgaaatcgggatactggtagttggcgtcttgctgtctgtgtacggcgatctgcggctactggaaaaccatcccaacaaacaagcgattgtttacggctttctgaaggaggctggttttagatggcagaaagggcaattcaaagcggcgctcagtggattgatggctccgcacgccgacctatggtctgctctaggtcagttattcgagggcgcacaataccaaaaagatcggctgggcaggctcgccactatctgccagaaagacggagaggaaacgcctgctatcgatgtgttacgacgcctgagtatggagggtttcattgatagtgttggctctgagggtgtaactcgcactggatcgaacgaccagcaacgaggggtcgtgaggatcggggagctacttgactccagtaagatcgattcccgcacgtttttaaaccttatcttgaatccaggcgaggctgctactgactgcgatcccttcatcctttccacactgcatggttccaaggggctggagtgggataacgtaatactgatcgggctgaatgagcaggaatttcctggcggcaaacccgatgatgtttacagcgttcgcacatcgatgaacacccctccggccgaagaggaaatcgaggaggaacgtcggctgttttatgtcggtatcactcgcacaaaacagcagctaaatctggtggtccctcttgatgaagggcttgcgcggtggctcaaaaaccgctgggatagcaccccgaagaagtcaccgatagctactcgcttcgtctatgaggctggctggactgcttgtgcggttaccagtgatgcgatctataacagcacggtagagaaacagaaggctgacttcagcaagtttcaccaatggtatctaagagatcttcagcggctaaaagtctag

SEQ ID NO: 5004 - protein, 679 aa, Enterobacter cloacae
MTKRLTWEQKSIVSHDTGHALVKAVPGSGKTTTLVKRVERLVKTGTDPRSILILMYNKSAQVSFTENLKTALMSSVIPEIRTFHSLALKIVGYGERQQIIKKKDLITPSDYRYEQLVKQAYRYGFDHEANYIDPNEIENFELFIARCRAAAVTPVDAANDPTFSNIKREFIHAYGRYCELLEENSLRTFDDCLIEAVALLRNDSSLGAHFKHIIVDEYQDVNLIQHDMTRLLSKSDTSVMAVGDVNQCIYEWRGARPDFIGGLFERHYPNTKVFQLSCTFRFGHELSLMANSVIRRNSTKLTKLCVSHPSTPKTEVRLHFDNCLSKVLSNLSVSSGTQAILSRTKANLAEAEIALRLCGLPYRYLNGSSALHTRTEIGILVVGVLLSVYGDLRLLENHPNKQAIVYGFLKEAGFRWQKGQFKAALSGLMAPHADLWSALGQLFEGAQYQKDRLGRLATICQKDGEETPAIDVLRRLSMEGFIDSVGSEGVTRTGSNDQQRGVVRIGELLDSSKIDSRTFLNLILNPGEAATDCDPFILSTLHGSKGLEWDNVILIGLNEQEFPGGKPDDVYSVRTSMNTPPAEEEIEEERRLFYVGITRTKQQLNLVVPLDEGLARWLKNRWDSTPKKSPIATRFVYEAGWTACAVTSDAIYNSTVEKQKADFSKFHQWYLRDLQRLKV

SEQ ID NO: 5005 - DNA, 219 bp, Enterobacter cloacae
atgatctacccctttttgtgtcagtcgggtgcgcaaattctcacgcatggcaagaacctgtttttctgtttccctgagcttaatagccccttctctctggattttaacaacatcgccaaccgtctggataagcgtatcctgcacctctttaagggtgcttatatcaataaccagccgttggtttgctttcatagtttctactgcattgcgatgcagtaa

SEQ ID NO: 5006 - protein, 72 aa, Enterobacter cloacae
MIYPFLCQSGAQILTHGKNLFFCFPELNSPFSLDFNNIANRLDKRILHLFKGAYINNQPLVCFHSFYCIAMQ

SEQ ID NO: 5007 - DNA, 414 bp, Enterobacter cloacae
atgtctgctaccgcaaccatgtttgcccagtcgttcttccatggaaccaaagccgctcttgcacccggtgatctgatcgccgtcggttatcgatcgaatttcacagacgcgaaatccctgtcgtgggtgtattttacaggcacgctcgatgcggcgatctggggcgccgaattggcgggtggcagcggaacggaacgaatttatgtcgtcgaaccgaccggcgccatcgaggaggatccgaacctgacggataagaagttcccgggtaacccgaccctgtcttatcgctcccgcgatccattgcgcgtaattgctgaagtgacgaagtggcaagcacacacggcccagcggctgcgggaaatgaaggagggcctggcgcgtctgaacgcagaaggtgccgagatcatcgattaa

SEQ ID NO: 5008 - protein, 137 aa, Enterobacter cloacae
MSATATMFAQSFFHGTKAALAPGDLIAVGYRSNFTDAKSLSWVYFTGTLDAAIWGAELAGGSGTERIYVVEPTGAIEEDPNLTDKKFPGNPTLSYRSRDPLRVIAEVTKWQAHTAQRLREMKEGLARLNAEGAEIID

SEQ ID NO: 5009 - DNA, 810 bp, Enterobacter cloacae
atgaacacaagggaaacaattgcggcggacctttcacggctgggtgtccaatccggcgctctcgtcatggttcacgcatcgctgaaggcgatcggccccgtcgatggaggcgcagcatcgatagtgtctgccctgctcgatgccgtcggccccactggaagcttgatgggatacgcctcgtgggaccggtcgccttacgaagaaacgctcaatggcgcacggatggatgcggaactgcgccaccgatggccgccgttcgatccagccatatcaggcacgtatcgcggcttcggcctgctcaaccggttcctcctccagacacccggcgcccggcgcagcgcgcacccggatgcctcgatggtcgcggtagggcctctggccggcactctgacgcggcctcacgaacttgggcaggctttcggacctggatcgccgctggagcgtttcgtcgagcgtgccggaaaggttctgttgctcggagccccgctcgattccgttaccgtcctgcactacgccgaggccattgcccgcatcccgaacaagcgacgcgtgagctacgaaatgccgatccgcagcgaggacggcggagtgagatggaaacgcgccgaggatttcgactccaacggcattctcgattgtttcgctatcgaaggagagccggacgccgtcgagacaattaccaatgcctatgtggagctgcgacgccatcgggagggcttggtcggtcaggcgcactgctacttgttcgaagcgcgggatatcgtttcgttcggtgtcgactatcttcaacggcactttggctcgccctga

SEQ ID NO: 5010 - protein, 269 aa, Enterobacter cloacae
MNTRETIAADLSRLGVQSGALVMVHASLKAIGPVDGGAASIVSALLDAVGPTGSLMGYASWDRSPYEETLNGARMDAELRHRWPPFDPAISGTYRGFGLLNRFLLQTPGARRSAHPDASMVAVGPLAGTLTRPHELGQAFGPGSPLERFVERAGKVLLLGAPLDSVTVLHYAEAIARIPNKRRVSYEMPIRSEDGGVRWKRAEDFDSNGILDCFAIEGEPDAVETITNAYVELRRHREGLVGQAHCYLFEARDIVSFGVDYLQRHFGSP

SEQ ID NO: 5011 - DNA, 582 bp, Enterobacter cloacae
atgtccgccaacaatgccgcaatagttctacgagtcatggccgagaacgatctgccaatgctccatgcttggctgaaccgcccccacatagtcgagtggtggggcggcgaggatgaacgcccaactcttgacgaagtcttagaacactattcgcccgaagttctggcaaagcaagctgtagtgccttacatcgcaatgctagatgacgaacccatcggctacgcccaatcctacatcgcacttggaagtggcgatggatggtgggaagacgaaactgatccaggggtccgcgggattgaccagtctttggctaatccatcacagttaaacaaggggttgggtacaaagctcgtacgctcgctcgttgaactcctgtttagcgacccggccgtaacgaaaatccaaaccgatccatctcctagcaaccatcgcgccattcgctgctacgagaaggccgggttcgttcaagaaaaaaacatcctcacacctgacggccctgcggtgtacatggtccaaacacgccaggcgttcgaaagcctgcgcactgttcaaagcttcaaaatcaaggggaagtggtcatga

SEQ ID NO: 5012 - protein, 193 aa, Enterobacter cloacae
MSANNAAIVLRVMAENDLPMLHAWLNRPHIVEWWGGEDERPTLDEVLEHYSPEVLAKQAVVPYIAMLDDEPIGYAQSYIALGSGDGWWEDETDPGVRGIDQSLANPSQLNKGLGTKLVRSLVELLFSDPAVTKIQTDPSPSNHRAIRCYEKAGFVQEKNILTPDGPAVYMVQTRQAFESLRTVQSFKIKGKWS

SEQ ID NO: 5013 - DNA, 816 bp, Enterobacter cloacae
atgagccatattcaacgggaaacgtcttgctcgaggccgcgattaaattccaacctggatgttgatttatatgggtatagatgggctcgcgataatgtcgggcaatcaggtgcgacaatctatcgattgtatgggaagcccgatgcgccagagttgtttctgaaacatggcaaaggtagcgttgccaatgatgttacagatgagatggtcagactaaactggctgacggcatttatgcctcttccgaccatcaagcattttatccgtactcctgatgatgcatggttactcaccactgcgatccccgggaaaacagcattccaggtattagaagaatatcctgattcaggtgaaaatattgttgatgcgctggcagcgttcctgcgccggttgcattcgattcctgtttgtaattgtccttttaacagcgatcgcgtatttcgtctcgctcaggcgcaatcacgaatgaataacggtttggttgatgcgagtgattttgatgacgagcgtaatggctggcctgttgaacaagtctggaaagaaatgcataagcttttgccattctcaccggattcagtcgtcactcatggtgatttctcacttgataaccttatttttgacgaggggaaattaataggttgtattgatgttggacgagtcggaatcgcagaccgataccaggatcttgccatcctatggaactgcctcggtgagttttctccttcattacagaaacggctttttcaaaaatatggtattgataatcctgatatgaataaattgcagtttcatttgatgctcgatgagtttttctaa

SEQ ID NO: 5014 - protein, 271 aa, Enterobacter cloacae
MSHIQRETSCSRPRLNSNLDVDLYGYRWARDNVGQSGATIYRLYGKPDAPELFLKHGKGSVANDVTDEMVRLNWLTAFMPLPTIKHFIRTPDDAWLLTTAIPGKTAFQVLEEYPDSGENIVDALAAFLRRLHSIPVCNCPFNSDRVFRLAQAQSRMNNGLVDASDFDDERNGWPVEQVWKEMHKLLPFSPDSVVTHGDFSLDNLIFDEGKLIGCIDVGRVGIADRYQDLAILWNCLGEFSPSLQKRLFQKYGIDNPDMNKLQFHLMLDEFF

SEQ ID NO: 5015 - DNA, 630 bp, Enterobacter cloacae
atgttacgcagcaacgatgttacgcagcagggcagtcgccctaaaacaaagttaggcatcacaaagtacagcatcgtgaccaacagcaacgattccgtcacactgcgcctcatgactgagcatgaccttgcgatgctctatgagtggctaaatcgatctcatatcgtcgagtggtggggcggagaagaagcacgcccgacacttgctgacgtacaggaacagtacttgccaagcgttttagcgcaagagtccgtcactccatacattgcaatgctgaatggagagccgattgggtatgcccagtcgtacgttgctcttggaagcggggacggatggtgggaagaagaaaccgatccaggagtacgcggaatagaccagttactggcgaatgcatcacaactgggcaaaggcttgggaaccaagctggttcgagctctggttgagttgctgttcaatgatcccgaggtcaccaagatccaaacggacccgtcgccgagcaacttgcgagcgatccgatgctacgagaaagcggggtttgagaggcaaggtaccgtaaccaccccagatggtccagccgtgtacatggttcaaacacgccaggcattcgagcgaacacgcagtgatgcctaa

SEQ ID NO: 5016 - protein, 209 aa, Enterobacter cloacae
MLRSNDVTQQGSRPKTKLGITKYSIVTNSNDSVTLRLMTEHDLAMLYEWLNRSHIVEWWGGEEARPTLADVQEQYLPSVLAQESVTPYIAMLNGEPIGYAQSYVALGSGDGWWEEETDPGVRGIDQLLANASQLGKGLGTKLVRALVELLFNDPEVTKIQTDPSPSNLRAIRCYEKAGFERQGTVTTPDGPAVYMVQTRQAFERTRSDA

SEQ ID NO: 5017 - DNA, 381 bp, Enterobacter cloacae
atgaaaaccgccactgcgccgttaccaccgctgcgttcggtcaaggttctggaccagttgcgtgagcgcatacgctacttgcattacagcttaccaaccgaacaggcttatgtcaactgggttcgtgccttcatccgtttccacggtgtgcgtcacccggcaaccttgggcagcagcgaagtcgaggcatttctgtcctggctggcgaacgagcgcaaggtttcggtctccacgcatcgtcaggcattggcggccttgctgttcttctacggcaaggtgctgtgcacggatctgccctggcttcaggagatcggaagacctcggccgtcgcggcgcttgccggtggtgctgaccccggatgaagggcactgttgcaaatag

SEQ ID NO: 5018 - protein, 126 aa, Enterobacter cloacae
MKTATAPLPPLRSVKVLDQLRERIRYLHYSLPTEQAYVNWVRAFIRFHGVRHPATLGSSEVEAFLSWLANERKVSVSTHRQALAALLFFYGKVLCTDLPWLQEIGRPRPSRRLPVVLTPDEGHCCK

SEQ ID NO: 5019 - DNA, 453 bp, Enterobacter cloacae
atgaataaattactgagccttgttgtttcacttgccctattgcctggagccgtttttgcagcgtcgactccagactgtgtgaaggtgaataaagcgcaaatcgaagcgctatttgataagtggaacgagtcattgaaaacaggtaacgcgcagacggtatctgaaaattatcttagcgatgcggtattgttgcctactgtatccaataaagcgcgtttaacggacgctgaacgtgttgattatttcgagcattttcttgcgaaaaagccgaccgggaaaattgacatgcgtaccattcgcctggggtgtaataaggcgatagacaccggtacctacacatttaccttcgcggacaaatcaacggtttcagcccgctacacattcacttatgcatgggacggtaaagagtggaaaatttccacacaccactcttcagcgatgcctgaagggtaa

SEQ ID NO: 5020 - protein, 150 aa, Enterobacter cloacae
MNKLLSLVVSLALLPGAVFAASTPDCVKVNKAQIEALFDKWNESLKTGNAQTVSENYLSDAVLLPTVSNKARLTDAERVDYFEHFLAKKPTGKIDMRTIRLGCNKAIDTGTYTFTFADKSTVSARYTFTYAWDGKEWKISTHHSSAMPEG

SEQ ID NO: 5021 - DNA, 1419 bp, Enterobacter sp. MGH 1
atgcgcacgccctggtatgcaaaacgtaagagctatcgagttctgttctggcgtgaaatcaccccccttgccgtgcctattttcctggagaatacctgcgtcctgctaatgggggtgctgagcacctttctggtgagctggctcggtaaagaagccatggccggggtagggctggcggacagtttcaacatggttgtgatgtccttctttgccgctatcgatctcggtacgacggtggtggtggcgtttagcctgggcaagcttgatccgaagcgtgcccgcgaagcggccagacagtcgctaatgatcatgaccctcttttcgatcatccttgcggcggttatccattattacggcaaagaaattatcgacattgtcgcgggagaagcgaccagcgaggtgaaggatctggctctcacctacctggaaatgacggtgctgagttatccggcggctgccatcgcgctgattggtagcggtgcgcttcgtggagcaggaaataccaaaattccgctgctgatcaacggcggcatgaacatcctgaatatcattatcagcagcgttttgatttacggcgtcttttcctgggaggggctgggctttgtcggcgcgggtttagggctgaccatttcccgctatattggtgcggcggcgataattggcgtactgatggcgggaattacgccatcgctgcgcctgacgctgaaaagctatttccgtccgcttaacttcgccattatctgggaagtgatggggatcgggattccggccagcatcgaatccgtgttgtttaacggtgggaaactgctgacgcagatgtttgttgccgggatgggaacagacgtcatcgccggcaactttattgccttctccatcgcctcgctcattaacctgcccggaaacgcgctggggtcggcgtcgacgatcatcaccggcagacgtctcggaaaggggcagatagggcaggcggaacggcaacttcggcacgtcttctggctttcaactattggactgacggcgattgcgtggggaactgcgccttttgccgggctgatggcctcgttctatacgcatgaaaatgacgtgaaagaggtcgtgaaggtgctcatttggctcaacgcggcgtttatgccaatttgggccgcgtcctgggtacttcctgccgggctgaaaggggcgcgcgatgcccggtttgcgatgtgggtctccatgctcggcatgtggggctgtcgcgttgtggcgggctacacgctgggggtaatgttgggtatgggcgttgtcggcgtctggctggggatgttccttgactgggccgtgcgcggggcgctgttctactggcgcatggtgagcgggcgctggctgtggaaatatccgcgaaaaaaaccggagcaggaggtttcggaaacggcaagtgcctga

SEQ ID NO: 5022 - protein, 472 aa, Enterobacter sp. MGH 1
MRTPWYAKRKSYRVLFWREITPLAVPIFLENTCVLLMGVLSTFLVSWLGKEAMAGVGLADSFNMVVMSFFAAIDLGTTVVVAFSLGKLDPKRAREAARQSLMIMTLFSIILAAVIHYYGKEIIDIVAGEATSEVKDLALTYLEMTVLSYPAAAIALIGSGALRGAGNTKIPLLINGGMNILNIIISSVLIYGVFSWEGLGFVGAGLGLTISRYIGAAAIIGVLMAGITPSLRLTLKSYFRPLNFAIIWEVMGIGIPASIESVLFNGGKLLTQMFVAGMGTDVIAGNFIAFSIASLINLPGNALGSASTIITGRRLGKGQIGQAERQLRHVFWLSTIGLTAIAWGTAPFAGLMASFYTHENDVKEVVKVLIWLNAAFMPIWAASWVLPAGLKGARDARFAMWVSMLGMWGCRVVAGYTLGVMLGMGVVGVWLGMFLDWAVRGALFYWRMVSGRWLWKYPRKKPEQEVSETASA

SEQ ID NO: 5023 - DNA, 501 bp, Enterobacter cloacae
atgcgcctgcaacagtgggccaccgaaaatattaaaaaactgctttatctcgcgggggatgacgcggtgattaattacgggaaaatgcggctggaatttttgcagaaagcactggcgcaggatacctccggtgacttctgctttcgtgtgctgcatccggaagtgtctggcccgccggatatgaaaaaggcttccgccgggtaccgtgactttattatcggtaacagagcgttgctggatctggtgaattcagccggtgaaggggctccggttgcgcattattccgctgatgaaattcagtcattattttcggcacaaatacaggggtcggtggataaatacggcgatagtttcctgacggatgatccgtatgtgctggcggaagacaagctgcaaacctgtcagatggaaattgatttaatggcggatgtgctgagagcaccgccccgtgaatccgcagaactgatccgctatgtatttgcggatgagtggccggaataa

SEQ ID NO: 5024 - protein, 166 aa, Enterobacter cloacae
MRLQQWATENIKKLLYLAGDDAVINYGKMRLEFLQKALAQDTSGDFCFRVLHPEVSGPPDMKKASAGYRDFIIGNRALLDLVNSAGEGAPVAHYSADEIQSLFSAQIQGSVDKYGDSFLTDDPYVLAEDKLQTCQMEIDLMADVLRAPPRESAELIRYVFADEWPE

SEQ ID NO: 5025 - DNA, 249 bp, Enterobacter cloacae
gtgcagtcgtctattgaacgaacagtatcaggagtccgctgcacgaatgatgacctcaagccggttctggtcgcgctggcgaccgatcagcccctggatgtgcgataccgcgaccacgatctttccggcgattgggcgggctaccgcgaatgctacatcaagcccgacctgctgctgatctaccgcaagtccgacgccgacaccctgcgactggcgcggcttggctcccatagcgagctgttcggctga

SEQ ID NO: 5026 - protein, 82 aa, Enterobacter cloacae
MQSSIERTVSGVRCTNDDLKPVLVALATDQPLDVRYRDHDLSGDWAGYRECYIKPDLLLIYRKSDADTLRLARLGSHSELFG

SEQ ID NO: 5027 - DNA, 1494 bp, Enterobacter cloacae
atgtcgaagctccacttcgccattaccccggataatcgcatcgccgagattaacccccggctgtttggctctttcgttgagcatctgggccgtgcggtttataccggtatttacgaacccggccacccggaagccgatgcgcaagggttccgccaggacgtgattaacctggtgaaagagatgaacgtcaccaccgtgcgctatcccggcggcaactatgtctccggcttcaactggcgcgatggcattggccccaaagaagagcgtccggtgcgcctggactacgcgtggatcagcaaagagagcaaccagtttggcatcagcgagtttaaccactggtgccaacaaacccacgtcgagccgatgatcgccatcaatctggggaccggcacgccgcaggaagcgggatactttattgaatattgtaaccaccctggcggcaccacgctcagcgatctgcgcgtgcagcacggcgacgccgaaccctataactttaaactctggtgcctcggtaacgagatggacggcccgtggcaaaccgggcaaatgagcgccgacgactacgccaaaaaggcgcgcgagacggccaaaattctgcgctgcgttgacccggaggttgagctcattgcgtgcgggagttcaagctcgatgatggataccttccccacctgggatcgggttgtactcgaggaactttacgactacgtcgattacatctcctgccaccagtattatgaaaacgaaggcactgaaagcgacttcctggcctccttcgtcaatatggacaactttatcgagaccatcgtcagcaccgccaactatgtgaaagcgtacaagcgcggtaagaaggacattatgatctccttcgatgaatggaacgtctggtatctgcgcggcgacccctgggatgcgccgatgaagcataaagagaatcgctttaaggttgcgccgcctttgctggaagaccgttactcttttctcgacgcgctggtcgttggcggtcttctctgctccctcattaaccactgcgatcgggttaaaatggccagcctcgcgcagttagtgaacgtcattgcccccatctttaccgaagcgggcggcggggtgattcgtcagaccatcttctggccctttgcgatggtggctaacgtggcgaaaggcagcgcgttgcgccacttcattcctgcgggcaccttcagcagcaaatacggtgacgcacggcgcatccagtctgccgtggtgcacaatgccgcagcgggtaaactctatttattcgcgctgaacagcgattttcacgacagcttcacgctggatccggatctgtcggcgtttggccagacgcgtcttgcagaacatcagatccttcgctgtgacgatctctacgcgaaaaatacctttgatcgtccggatcgcgttgcgccggagacgctcacggcctccgacctcaccctgccgccgctgtcgtggaaccgcatcaccttcgacatcctgtaa

SEQ ID NO: 5028 - protein, 497 aa, Enterobacter cloacae
MSKLHFAITPDNRIAEINPRLFGSFVEHLGRAVYTGIYEPGHPEADAQGFRQDVINLVKEMNVTTVRYPGGNYVSGFNWRDGIGPKEERPVRLDYAWISKESNQFGISEFNHWCQQTHVEPMIAINLGTGTPQEAGYFIEYCNHPGGTTLSDLRVQHGDAEPYNFKLWCLGNEMDGPWQTGQMSADDYAKKARETAKILRCVDPEVELIACGSSSSMMDTFPTWDRVVLEELYDYVDYISCHQYYENEGTESDFLASFVNMDNFIETIVSTANYVKAYKRGKKDIMISFDEWNVWYLRGDPWDAPMKHKENRFKVAPPLLEDRYSFLDALVVGGLLCSLINHCDRVKMASLAQLVNVIAPIFTEAGGGVIRQTIFWPFAMVANVAKGSALRHFIPAGTFSSKYGDARRIQSAVVHNAAAGKLYLFALNSDFHDSFTLDPDLSAFGQTRLAEHQILRCDDLYAKNTFDRPDRVAPETLTASDLTLPPLSWNRITFDIL

SEQ ID NO: 5029 - DNA, 474 bp, Enterobacter cloacae
gtgaaactatatatttacgttggttttattaccgcagccatctccatcctgatttactttatcgacccacgaaacatagagactattttcgccctcaacaccctgcgcggctatattggcgcgattacggtgccgatattctggtcctttattggcgatgccgacgactttggcgcatggaagttcaagcgtcgcatgtccggcgtctatgcatccggcaacctgttcgccctgaaggtgagtctggcgattgccggcacgattaccgccaccatcctgtccttaacacactatgttccggatgcgcctcagcaaacgccagagacactgaacgccattatgctgctgatcaccgtcattcccgcagcgggcagcatcatcacatcactgctgttcctgttcttttacaagctggacacccggatgatgaacgaaattcagaccgatttaaaagctaaccactaccccgcttaa

SEQ ID NO: 5030 - protein, 157 aa, Enterobacter cloacae
MKLYIYVGFITAAISILIYFIDPRNIETIFALNTLRGYIGAITVPIFWSFIGDADDFGAWKFKRRMSGVYASGNLFALKVSLAIAGTITATILSLTHYVPDAPQQTPETLNAIMLLITVIPAAGSIITSLLFLFFYKLDTRMMNEIQTDLKANHYPA

SEQ ID NO: 5031 - DNA, 792 bp, Enterobacter cloacae
atgactactttaactgtcggccagtgcctcacctcttttaacaacgagtatgtagtaagcgcggttaatctggctgacggcaaaatcagctataccatcctcggcctgaatgccccgacctgcgccccgctgctggaaacctccctgcgtttttaccaggtgatcgacaagaccctttcactcgatgaactccgcgcccgccgtcaggttgtgcagagtgtgaccgaccagcgcgaagcgagacaccaggcgaaagaagatgcccgccagctggcgaacgaacgtgccagcgctgacccggaaaacgccggattgctgacaacggccaccgaaagcaacaccaccaagctagccgctaaaaacatccgtattctgctgaaaaagcatttccccggcgtgaagttttctgtccgtatgcgtgactataacgcgctctatgtttcgtggacggatggcccaaccaaagaggctgtagaagcgattacagataagtttgaggaaggtagcgttaactcaatggaagacatttacgaatacaacattacgggcttccaccgtgtttatggtggcgtgaaatacctgttttgctcacgtgacctgaccgacgcgctgatcgctgaatctatcgacctgctacgcaaagaatacggcgaaaccaccatccccgctgatgtgacgcttgaggcgtacaaatccggggcgctggcggggcgcgggcatgactgctttacctgggggcttgcagcgcaaatccgcatcaatgcgggaaaggtggataaatccagccgctaa

SEQ ID NO: 5032 - protein, 263 aa, Enterobacter cloacae
MTTLTVGQCLTSFNNEYVVSAVNLADGKISYTILGLNAPTCAPLLETSLRFYQVIDKTLSLDELRARRQVVQSVTDQREARHQAKEDARQLANERASADPENAGLLTTATESNTTKLAAKNIRILLKKHFPGVKFSVRMRDYNALYVSWTDGPTKEAVEAITDKFEEGSVNSMEDIYEYNITGFHRVYGGVKYLFCSRDLTDALIAESIDLLRKEYGETTIPADVTLEAYKSGALAGRGHDCFTWGLAAQIRINAGKVDKSSR

SEQ ID NO: 5033 - DNA, 543 bp, Enterobacter cloacae
atgaatattttaagcagatgcctgatggcactgtcgagaaagagccgcatgagtattaaagatgtgactttttcgagtgagggtgctctttatacggtcgtcattagctcctcaaccattgagcagatggtttccgaatgccttaaagctggagtaaatgaaacaggtggcattctgattggctcatacagcgaagacggttctacggcaatgatcgtggaagccacgacccggccagcggattcactcgctggccggacgacatttcaacggggcgtcagagggctgaggactttacttcatgcccgatggaaaacgggattgtattatgttggtgagtggcattttcatccaagaggctcacccgagccaagtggggatgatttcaggtccatgacaagcattgcagcgaactctgactaccagtgcctggagcctgtaatgattatacttggaggggagccggcaggctcatacagtctgagcgccagtgtattcccaaggggagacgtccccatcagactgcgagaggtgctgctttaa

SEQ ID NO: 5034 - protein, 180 aa, Enterobacter cloacae
MNILSRCLMALSRKSRMSIKDVTFSSEGALYTVVISSSTIEQMVSECLKAGVNETGGILIGSYSEDGSTAMIVEATTRPADSLAGRTTFQRGVRGLRTLLHARWKTGLYYVGEWHFHPRGSPEPSGDDFRSMTSIAANSDYQCLEPVMIILGGEPAGSYSLSASVFPRGDVPIRLREVLL

SEQ ID NO: 5035 - DNA, 1533 bp, Enterobacter cloacae
atgtcatatttaccccctgcacttccactggttaattctgccaatcccttccccgttgatgcattgccattgataatgcaaaacaccatcaactaccttcaggatggtggaaaagtaccgactgtactggtcgtgaacgctgttttagcggcagtatcattagcctgccattcgcatatcaatgtactcaatccttacacggacatagaggagcattgttcactcaacatcctgacgctcgctgattcagggacgggcaaatcgtccgtcagcaaacaggtaatgaagccctttgatgctttcagggctgaattggccgaatcacatcgggttaaccaggctgtctggcgccaagattatgtcgtatggaaaaccagtttaaaggcgctggaaagtaagctgcgcgatgcagttaaaaaagaccagtgtacagacgaggcccaggcagccctgaaatctcacgcatcggttgaacccgtcagaccagtgctaccaacgctggtctacaatgacacctcgcttgccgcgctcatcgctggcctgaatgagtatccgtgcgcaggtctgatttctgatgaagccagcaacttctttgacgctcgtcttaaagataatctggcgttcttcaacaaagcctgggatggcgatatgtatgagcataatcgtcatcagcgtgccacccagagctttaaaccgacgctgacggtgtccttaatgttacagccttcgctttttttcgattacatgaaaaaggatggtgataaagcattagagagcggttttttatcccgcttcctcttttcaaatatcaccccgaacaccatgctgagttcctgtgtgatgagccaccattatcgtccggataccgcataccgtgatgaaaatgctttaacctgctttcacgacctgattggaaaattactcgggcaacagctaaaacaaatttattctggtgaaggtaagaaaaaggttctcaagctttcacctgaagcagaagtccactggcagactatgcgtgagaactggctgagatacacattcccgggtggtgcctggtcatatatcaaacccatggtactgaaagccagtacgaatgtgttgcgtatcgctgcgctgctgaattacttaaccaaccaggaggatgatattattactactgatgttatttcgcgagcatcagcgatagtgaactggtatctcaaccataccgcagcctggttttatcaattcacggatgagtataaattccagcaagacgtgcaaatactaacccagtggatccatcataaattcaggtccactaacggctttccgtttaaaaagaacgatgtcattaaatatgggccgaacaaatttcgccgcagcgaaaaactggaaccgttgctgaatgccatcatgactacaggtactttcgcatacatggttaaatctcctgagaatccggctatttatattacctggctcatgaacgatggtcgctatatgccattttatgatgataaacagccgccttcacctcagaaccctgcttag

SEQ ID NO: 5036 - protein, 510 aa, Enterobacter cloacae
MSYLPPALPLVNSANPFPVDALPLIMQNTINYLQDGGKVPTVLVVNAVLAAVSLACHSHINVLNPYTDIEEHCSLNILTLADSGTGKSSVSKQVMKPFDAFRAELAESHRVNQAVWRQDYVVWKTSLKALESKLRDAVKKDQCTDEAQAALKSHASVEPVRPVLPTLVYNDTSLAALIAGLNEYPCAGLISDEASNFFDARLKDNLAFFNKAWDGDMYEHNRHQRATQSFKPTLTVSLMLQPSLFFDYMKKDGDKALESGFLSRFLFSNITPNTMLSSCVMSHHYRPDTAYRDENALTCFHDLIGKLLGQQLKQIYSGEGKKKVLKLSPEAEVHWQTMRENWLRYTFPGGAWSYIKPMVLKASTNVLRIAALLNYLTNQEDDIITTDVISRASAIVNWYLNHTAAWFYQFTDEYKFQQDVQILTQWIHHKFRSTNGFPFKKNDVIKYGPNKFRRSEKLEPLLNAIMTTGTFAYMVKSPENPAIYITWLMNDGRYMPFYDDKQPPSPQNPA

SEQ ID NO: 5037 - DNA, 420 bp, Enterobacter cloacae
gtggctaacgacattacttttcccgccacgttaacctccgtctcgccgcttgcggcatggcttgagcgtcagatggcttcgctgtccgttagcgatgactggcgctttgcgctcgatctcgccgcctgtgaaacggctaccaacattattcgtcatgcgcaacatgaggatccggaacgttgcttcaccgtggagttcatcgttaccgtctcggacgcggcgctgcgttttacggacgatggcgataaatttcccgctgaacgtctcgcggcggtgcgtgacgacgcgacgttcgatgcctctcttttggctgaaagcggcagaggactgaaactcattttgttgtatgtggataatttcacggtagaaaacattgcagggaaaaatatcaccgttctggagaagaggatggtcggataa

SEQ ID NO: 5038 - protein, 139 aa, Enterobacter cloacae
MANDITFPATLTSVSPLAAWLERQMASLSVSDDWRFALDLAACETATNIIRHAQHEDPERCFTVEFIVTVSDAALRFTDDGDKFPAERLAAVRDDATFDASLLAESGRGLKLILLYVDNFTVENIAGKNITVLEKRMVG

SEQ ID NO: 5039 - DNA, 339 bp, Enterobacter cloacae
atgaacattgatacagaccgactggacgacgtaaacattatgacgccttcggtgcgccgactggacgcctcggtggcggcggtatttaaggaagccattgcccgggagattggggtggatcgtaaagccctgatagtcgatttcagcaaaatcgattttatcgacagcagcggccttggcgcactggtttccctgctgaagatgatgaacggtaaaggtgaaatgatgctgtgtgcgctgaaccccggtatacgcaacatgttcaccctgacccgtatggatcgcatatttcgcatttgcccggatcgcgctacggcactttcgcatctaaatcagtga

SEQ ID NO: 5040 - protein, 112 aa, Enterobacter cloacae
MNIDTDRLDDVNIMTPSVRRLDASVAAVFKEAIAREIGVDRKALIVDFSKIDFIDSSGLGALVSLLKMMNGKGEMMLCALNPGIRNMFTLTRMDRIFRICPDRATALSHLNQ

SEQ ID NO: 5041 - DNA, 1215 bp, Enterobacter cloacae
atgttgtcacagcacgtcctgatagttgaagactcactggtttatcgtcgcctgcttagcagaatgctgacgcagtgggggtataccgtctacgaggcggagaacggcgttgccgcgcttgagatcctcgaaaaccagccagtcagcctggtgatcagcgactgggatatgccggaaatggatggcctgacgttgtgccgggaggttcgcagccgtcagttcggacattatgtttatttaattttgcttaccgcacgcgaagagccgggcgatctgacggtggggtttgacgccggtgcggatgattttctcaacaagccggtcgagcagagtgagctgcgggcgcgattgcacgcgggggcacgggttctgtcccttgaggccacgcttgctacgcgtaatgcacgcctcagtgaggcgttaaggcagatagagcaagaccttgaagtggcggcgcggatccagcagtcggttctgcctgcgcatcagttgcgttaccgggattactttgcagactggatttttttgccgtcagcctgggtgtccggcgatattttcaatgtcttcccgctggacaatcacctgggattctactgtgtagatgtgtcggggcacggcgttggtgcggcgatgatgtcacttgccgtggcccgtcagtttctgcatggcagggcggtagagcgttttctgtttgcggacgatagcgacgttgcctcccctgcggaagtcgttcggatcctgaatggtcgcttttgcagcgaagaggttgagataatgagttatttcaccatgatttacggtgttatcgacctgacaacaggtgaaggcaagctttgccaggccgggcatcctacgccgttcattgtgaaccctggcggcgaggtcaggacggtaggtgaaggcggcgcgccggtaggattgatgccggatctcagctggtcagacgtaagcttctcgctggcgccgggtgagcgcctctgcctgtttagcgatggcatcaccgagtgtgaaaatcctgacaacgaacagtttggtcaggctcgtttgcagcgtcggcttcaggatgacgccacgctcgcactggaacggctcttaccgcagtttgcgcagcatcttatacgctggcgcagcggaaaataccgtgaacagcaggccatggcggacgatgtttccttattagtgattgagcgtacaggagtaaacgatgaacattga

SEQ ID NO: 5042 - protein, 404 aa, Enterobacter cloacae
MLSQHVLIVEDSLVYRRLLSRMLTQWGYTVYEAENGVAALEILENQPVSLVISDWDMPEMDGLTLCREVRSRQFGHYVYLILLTAREEPGDLTVGFDAGADDFLNKPVEQSELRARLHAGARVLSLEATLATRNARLSEALRQIEQDLEVAARIQQSVLPAHQLRYRDYFADWIFLPSAWVSGDIFNVFPLDNHLGFYCVDVSGHGVGAAMMSLAVARQFLHGRAVERFLFADDSDVASPAEVVRILNGRFCSEEVEIMSYFTMIYGVIDLTTGEGKLCQAGHPTPFIVNPGGEVRTVGEGGAPVGLMPDLSWSDVSFSLAPGERLCLFSDGITECENPDNEQFGQARLQRRLQDDATLALERLLPQFAQHLIRWRSGKYREQQAMADDVSLLVIERTGVNDEH

SEQ ID NO: 5043 - DNA, 900 bp, Enterobacter cloacae
atgcgggataaatttttgctgacctgcgcactgctgtgcgttgccactggcgcagagtcggcgccgaaggacgatgcggattcactacgtgacaagaacggcgagccggtgcaggctggcgtgttcaccagccgctggggtcgcctgttctccggtaatgaagacgtcttctctggcgcgctgagctttagttcgggactaaaagagcagtggatgactatccctaacagctcggacaccgcagagcagaaacgtaaatacaaccagacgcttaatctcagcctgcaatactcaccctacagttactggtttgcgaacgtgacatcgcgtttgccggtgacggacaccagccgctacacggccgattttcgttacagttttggctatgatgactggcatgccaacactttcagcctggtgtacagcaattacggggataaccgcttctggacgtcaggaaaccgtcgccacacctattttgagcagggggccgtgacgctggcgtataaattttcactgccgaaaccgatagagaatacgctcctgattaacaaaggcgactctatcatttgccagatgggctacagctgggttccgcgttattacgatctggacagcaacgatatccgcaaaaacaagaacgtggtattgggcgggtgtggttatacctttaagcagcacttcttcgtgcgcgccacggcgttctggtttccggacagcagccagcaacagccctggaacggcgactacagctatagttttggctatgcgggttatacgccaggttcattctctgttcagtatgctaactactccggcacccgttaccccggtcaccagagcggcagcggtaaattccgggaaggcaccgtcagcgtcatctggttcttaccgctatag

SEQ ID NO: 5044 - protein, 299 aa, Enterobacter cloacae
MRDKFLLTCALLCVATGAESAPKDDADSLRDKNGEPVQAGVFTSRWGRLFSGNEDVFSGALSFSSGLKEQWMTIPNSSDTAEQKRKYNQTLNLSLQYSPYSYWFANVTSRLPVTDTSRYTADFRYSFGYDDWHANTFSLVYSNYGDNRFWTSGNRRHTYFEQGAVTLAYKFSLPKPIENTLLINKGDSIICQMGYSWVPRYYDLDSNDIRKNKNVVLGGCGYTFKQHFFVRATAFWFPDSSQQQPWNGDYSYSFGYAGYTPGSFSVQYANYSGTRYPGHQSGSGKFREGTVSVIWFLPL

SEQ ID NO: 5045 - DNA, 1218 bp, Enterobacter cloacae
atgagccagattgcgcctgtgcttataaataaagacgttgaaaaaccaacgacatggcgttacatcgcgtcggataaacgtgatttacgtattgattttatgcgcggtatcgccttagtgatgatggtggtggcgcacacggaagtgatgtcgatatttaatatatttacctgggaaaggtttggtctggtcaccggcgctgagggttttgtgatcctttcaggatttatgctgggaatgttaaaccgtgtaagattgcaaaaagcagtattgttgactatatcctggggactttatctgcgtgcatggaaaatatatcggataaatatcatcattattctttcatttttactgttaggatatctgccgtttattaacgtctttgaggtgacccattttaccgatcgttactcaggtacaacctggtcactgtatccggtgacgccccaaattaaagaaacctggtttaacattgtcctctacctgcaaattggccctcatcaaacgcaaatccttgggctctatatttttcttctgctgttaagccccctgtttttggggatgctccagaaaggatacgtctactggctgctgggtttatcgttgctcgtctacggcggctggcagatgtggccggtacgcgctacgccgtctcagtttgaattcgcgtttccgctgctggcctggcagtttattttcgtgctgggtatgtgcagcggttggtacaaagaggatttgatctcttttgcccgtacgcccgccggtaaggtcgtgctcgtggcgctggtgataattgcgctgcttcttggctttatcgcccagaaccataccaacccgtttatgccgcccgcactgctaatgcacagcctctcgccggaggacttcaacgctttttatcatacctgggcggcaaaaaatggccttgggcccgtcagggtacttaacgatatctgtctgatggtgaccgtctatttggtgctgacctggtgctggctgcccctgtatcgcctcgcaggctggtttcttattccgctgggtcaacattcgctttatacctttattttgcatgtctacgtcgtatttctggtaagccagttcgtcacgttcgatttgtggcgccaggactggatagtgaacaccttcattcacgctgcggcgctgggcgtgctgtggctgatggcgaaatataacgtcgccgcgcgctggatacctaactaa

SEQ ID NO: 5046 - protein, 405 aa, Enterobacter cloacae
MSQIAPVLINKDVEKPTTWRYIASDKRDLRIDFMRGIALVMMVVAHTEVMSIFNIFTWERFGLVTGAEGFVILSGFMLGMLNRVRLQKAVLLTISWGLYLRAWKIYRINIIIILSFLLLGYLPFINVFEVTHFTDRYSGTTWSLYPVTPQIKETWFNIVLYLQIGPHQTQILGLYIFLLLLSPLFLGMLQKGYVYWLLGLSLLVYGGWQMWPVRATPSQFEFAFPLLAWQFIFVLGMCSGWYKEDLISFARTPAGKVVLVALVIIALLLGFIAQNHTNPFMPPALLMHSLSPEDFNAFYHTWAAKNGLGPVRVLNDICLMVTVYLVLTWCWLPLYRLAGWFLIPLGQHSLYTFILHVYVVFLVSQFVTFDLWRQDWIVNTFIHAAALGVLWLMAKYNVAARWIPN

SEQ ID NO: 5047 - DNA, 816 bp, Acinetobacter baumannii
gtggctaaaacaaagttaaacatcatgagggaagtggtgatcgccgaagtatcgactcaactatcagaggtagttggcgtcatcgagcgccatctcgaaccgacgttgctggccgtacatttgtacggctccgcagtggatggcggcctgaagccacacagtgatattgatttgctggttacggtgaccgtaaggcttgatgaaacaacgcggcgagctttgatcaacgaccttttggaaacttcggcttcccctggagagagcgagattctccgcgctgtagaagtcaccattgttgtgcacgacgacatcattccgtggcgttatccagctaagcgcgaactgcaatttggagaatggcagcgcaatgacattcttgcaggtatcttcgagccagccacgatcgacattgatctggctatcttgctgacaaaagcaagagaacatagcgttgccttggtaggtccagcggcggaggaactctttgatccggttcctgaacaggatctatttgaggcgctaaatgaaaccttaacgctatggaactcgccgcccgactgggctggcgatgagcgaaatgtagtgcttacgttgtcccgcatttggtacagcgcagtaaccggcaaaatcgcgccgaaggatgtcgctgccgactgggcaatggagcgcctgccggcccagtatcagcccgtcatacttgaagctagacaggcttatcttggacaagaagaagatcgcttggcctcgcgcgcagatcagttggaagaatttgttcactacgtgaaaggcgagatcaccaaggtagtcggcaaataa

SEQ ID NO: 5048 - protein, 271 aa, Acinetobacter baumannii
MAKTKLNIMREVVIAEVSTQLSEVVGVIERHLEPTLLAVHLYGSAVDGGLKPHSDIDLLVTVTVRLDETTRRALINDLLETSASPGESEILRAVEVTIVVHDDIIPWRYPAKRELQFGEWQRNDILAGIFEPATIDIDLAILLTKAREHSVALVGPAAEELFDPVPEQDLFEALNETLTLWNSPPDWAGDERNVVLTLSRIWYSAVTGKIAPKDVAADWAMERLPAQYQPVILEARQAYLGQEEDRLASRADQLEEFVHYVKGEITKVVGK

SEQ ID NO: 5049 - DNA, 474 bp, Enterobacter cloacae
ttgaaagtatcattgatggctgcgaaagcgaaaaacggcgtgattggttgcggtccagacataccctggtccgcgaaaggggagcagctactttttaaagcattgacctacaatcagtggcttctggtgggtcgcaagacgtttgaatctatgggcgcactccccaataggaaatacgcggtcgttacccgctcaggttggacatcaaatgatgacaatgtagttgtatttcagtcaatcgaagaggccatggacaggctagctgaattcaccggtcacgttatagtgtctggtggcggagaaatttaccgagaaacattacccatggcctctacgctccacttatcgacgatcgacatcgagccagagggggatgttttcttcccgagtattccaaataccttcgaagttgtttttgagcaacactttacttcaaacattaactattgctatcaaatttggaaaaagggttaa

SEQ ID NO: 5050 - protein, 157 aa, Enterobacter cloacae
MKVSLMAAKAKNGVIGCGPDIPWSAKGEQLLFKALTYNQWLLVGRKTFESMGALPNRKYAVVTRSGWTSNDDNVVVFQSIEEAMDRLAEFTGHVIVSGGGEIYRETLPMASTLHLSTIDIEPEGDVFFPSIPNTFEVVFEQHFTSNINYCYQIWKKG

SEQ ID NO: 5051 - DNA, 135 bp, Enterobacter hormaechei
atgaacctcattccatattacaagctcatcatccttcatggccatacggaattccggatgccggtttacgacgtgagaaataagggaaataatcgcaggataaaatttccagccaacctctttgatatgctttag

SEQ ID NO: 5052 - protein, 44 aa, Enterobacter hormaechei
MNLIPYYKLIILHGHTEFRMPVYDVRNKGNNRRIKFPANLFDML

SEQ ID NO: 5053 - DNA, 393 bp, Escherichia coli
atggacataaaaaaaatacggaaggaaaagataaaccgacttgtggtgtatgaaattatgcaatggattgatgagcatctggaggagccgctgaaggttgaggatgtttctgcaaaagctggttattcaaaatggcattttcaacggatgttcaaggaggtggcaggaataagtctagggaaatatataaagcttgaaaaactaagacgtgcttattttttactggagaatacggatatacccgtcatagaggtgtgctttatgctcgggtttaccagtcagcaggtatttacccgagcgatgagaaatgaaatgcatcatacaccaggggctgtcagaaggaataaacctgttctgaaaaagagttctggtataaagcgtgatgagttataa

SEQ ID NO: 5054 - protein, 130 aa, Escherichia coli
MDIKKIRKEKINRLVVYEIMQWIDEHLEEPLKVEDVSAKAGYSKWHFQRMFKEVAGISLGKYIKLEKLRRAYFLLENTDIPVIEVCFMLGFTSQQVFTRAMRNEMHHTPGAVRRNKPVLKKSSGIKRDEL

SEQ ID NO: 5055 - DNA, 312 bp, Citrobacter amalonaticus
atgaacaagaaaactaagcgtactttcacccccgagttcaggatggaatgtgcacagctgattgttgataagggctactcctatcgacaagccagtgaagcgatgaatgtcggttctaccacgcttgagagctgggtacgccagctcaggcgtgagcgccaggggattacgccctctgccacacctattactccagaccagcaacgtatccgcgagctggaaaagcaggttcgtcgcctggaggaacagaatacgatattaaaaaaggctaccgcgctcttgatgtccgactcactgaacggttcacgatag

SEQ ID NO: 5056 - protein, 103 aa, Citrobacter amalonaticus
MNKKTKRTFTPEFRMECAQLIVDKGYSYRQASEAMNVGSTTLESWVRQLRRERQGITPSATPITPDQQRIRELEKQVRRLEEQNTILKKATALLMSDSLNGSR

SEQ ID NO: 5057 - DNA, 1233 bp, Enterobacter cloacae
atgaaatacttacacataattaaaaaatactccttcttttcgatagcccccttaattacggctttaattcagcttttttcggtttttataattgggcatacgctgtcaggtcctgaattgggtttggcaggtatttttaataccctgatttttattcttgttttcatatccgatggtggaagttctaattactttatttacaggaaaattgttagctttccagaggttaggataattactgtattaaatgtttctgtctcattcttatctatcttattatatttcgtactgtcacctaattttattgaaagtagtattgtcacattgatttctttttttgtgatggctttatcgattagttttccgttatatcattattcgcgattgttagttgagaaaaagtttaataccatagctatggttgaagtcttttcaaaatttgtatttattgctagtttgtcagcgctaatctaccgatttcaaatccagggagtcgctgttgtatatgcatggacagcttcatatgtaataaggtgtttgatttttatagttgtatgtaggggattttctttgtatcaagaaaattcaatcaaatacggaattaaaaatatcattcgtagatggtgggcatatattcataatcaaatattttcccaatttttgaattatatcactctcactgcggatatattcattgtttcacacttcggaggattggagcgcgtgggcgtctacagtctctgcaaggatgccactttaaaaattagtgccgtcataagtccagttatcggtaaattattgataagtcatgtcgtcacttcagacattaaagtgatccatttaaatgcgaagagaatatttttaagcattctctttgttgctatgactatttttcttgcatggagtgtagtaggtccttatcttcttcaagagttacgaccagatatacattccgattttgagatctttatttatgcttgggctatctgtggtgtattgagaatgcttataaatccagtagcaacaatatttcaagggttgggtgaaacgcgaaaagaactttatataaacttggtttcatcgttaagttttataatgatattttcgttgttatatgtaagtggtgttataactggtgtgattaacattatcctcattactctcatcgggatgtatgttatatcactaatatactcaggatggcttttgcaaaaacgctttcaaaaaatttga

SEQ ID NO: 5058 - protein, 410 aa, Enterobacter cloacae
MKYLHIIKKYSFFSIAPLITALIQLFSVFIIGHTLSGPELGLAGIFNTLIFILVFISDGGSSNYFIYRKIVSFPEVRIITVLNVSVSFLSILLYFVLSPNFIESSIVTLISFFVMALSISFPLYHYSRLLVEKKFNTIAMVEVFSKFVFIASLSALIYRFQIQGVAVVYAWTASYVIRCLIFIVVCRGFSLYQENSIKYGIKNIIRRWWAYIHNQIFSQFLNYITLTADIFIVSHFGGLERVGVYSLCKDATLKISAVISPVIGKLLISHVVTSDIKVIHLNAKRIFLSILFVAMTIFLAWSVVGPYLLQELRPDIHSDFEIFIYAWAICGVLRMLINPVATIFQGLGETRKELYINLVSSLSFIMIFSLLYVSGVITGVINIILITLIGMYVISLIYSGWLLQKRFQKI

SEQ ID NO: 5059 - DNA, 501 bp, Citrobacter koseri
atgacggtaatgacacttgacgtgatccagaaacaaccaatagcgcttcgcggtctagtctgcaagtatctggctaagcctcgctggcaggacacttgcgatttttacaatcagatgatggagcgggagcgtcttacggtttgtttccacgctcaattaaaacagcgtcactctgttatgcgcttagaggaaatgaccgaagccgatcgtgagcgtcttgtttgtgcgcttgatgaattgagaaatgcatttgcccggcaccgccaacttggcgcgtcaaaagcaactttcatcagccgcctgaccgtcagccaaagacgctcattgtttcttcatgctggactgacagagcaggaatttatgatgccgcactggcgtttgaatgaggaggactgttattggcgtgacaaacttttccgcgctctgcgagagctgtttagcctttttgagtacgcaccaaccattttaacctcggtaaaacctgagcagtatttacattaa

SEQ ID NO: 5060 - protein, 166 aa, Citrobacter koseri
MTVMTLDVIQKQPIALRGLVCKYLAKPRWQDTCDFYNQMMERERLTVCFHAQLKQRHSVMRLEEMTEADRERLVCALDELRNAFARHRQLGASKATFISRLTVSQRRSLFLHAGLTEQEFMMPHWRLNEEDCYWRDKLFRALRELFSLFEYAPTILTSVKPEQYLH

SEQ ID NO: 5061 - DNA, 384 bp, Enterobacter cloacae
atgatgaataccgtattgaactcacgtgaagaagcccttgaccggggcaaactgattaaccttgatgacgaggcgctggacgcaggcttgccgctggatctggccattactcttccggcccacaagcactgtcttgaagaccggaatgacaacgccatcagggacttgctgaaaggtgttgaaatggcagcggtagtggcctttatctcccaccaaccgccgcaacgcaccattcgtatcgattaccgctcggtgctgacgcagaaaaccaacggcagcacgcagcagcaaaccgtcaggctgacattacgcgttcatttttctgagcaaggcatccccatcgccgccactctggggctgatgggggaaagattcccttactga

SEQ ID NO: 5062 - protein, 127 aa, Enterobacter cloacae
MMNTVLNSREEALDRGKLINLDDEALDAGLPLDLAITLPAHKHCLEDRNDNAIRDLLKGVEMAAVVAFISHQPPQRTIRIDYRSVLTQKTNGSTQQQTVRLTLRVHFSEQGIPIAATLGLMGERFPY

SEQ ID NO: 5063 - DNA, 483 bp, Enterobacter cloacae
atggctaaaaaaacagcgcctttgcttccggatactaatcagttgcttgctgagtttggtgagcgccttaagttggcgcgtctgagacgcaagcttacagcaaagcaggttgctgaacgggctggaatgtctccaatgacattgcgttcccttgaatcaggtggggctggtgtgacaatcggcgcttacttgtctgttatgcagatcttagggcttgaaaaagatctaaataaacttgccgccgaggatgagcaaggacgcctactccaggattccaggttaataaacaaaacgtatgcttctcatccttctgcaacttctcgcacaaacaggcataccgggaatgtggtaaaacgtgacgcgtccggtaagcaatccatggtcccatcaaaaaaatcagcaaatgccgaactaaaaacatctgccgcgacatcggcatccctggctgcgctgttaaaaccaataaaaaatcctaaaaggtaa

SEQ ID NO: 5064 - protein, 160 aa, Enterobacter cloacae
MAKKTAPLLPDTNQLLAEFGERLKLARLRRKLTAKQVAERAGMSPMTLRSLESGGAGVTIGAYLSVMQILGLEKDLNKLAAEDEQGRLLQDSRLINKTYASHPSATSRTNRHTGNVVKRDASGKQSMVPSKKSANAELKTSAATSASLAALLKPIKNPKR

SEQ ID NO: 5065 - DNA, 1269 bp, Enterobacter cloacae
atggcaatgattggcgtgtatgcggactgggatggcctgcatggccccagacgaatcggctttttgcatagtcgccggacccgtgcgcgggaattatttgaatttgagtacgatccggatgctttagccgatcccgagcttaacttcctgcagcttgaccctgaaatagttttgtttggaggtgctcagtatccaacaccacctcgcgataaatttggtgtttttggtgactccagtcctgaccgctgggggcgaatgctgatgaaaagacgcctggaacgggatattcgtgaagggcttctgcctgaagggacacaactgcacgaatccgattatctgctgggtgtgcatgatctttatcgggttggtgctctgcgttacaagttggaagatgaaggtgagtttcttgataatcgaatggatgttgcggcccctccatttaccgaaattgccgcattagaaagagccagtcggtcacttgaggatgatccggataacagagcattgatgggccatgaatggctaagaatgctaatagcgccgggtggttctctcgggggcgcacggccaaaggcaagcgttgcggatgacaacggacatctttatatcgctaaatttccgagcacaagagatgaatatgatgtcggtggttgggagatggttgttaacgctctggctgtcggttgtggccttaatgtggctgctgcacaagcacgtaaattcgctagcgatcatcattgttttatggtccgtcgttttgaccgtaccgatgttggtcagcgtcttcattttgcatctgccatgacgctaacccgacaccaggatggggacgattactcaacaggagctagctatctggaacttgctgaagttctcatcagaaatggtgcacagaccaatgctgacctacaggaactctggtcacgcatcgtttttaatattctggtctctaattcagatgatcatttgcgaaaccacggatttattctggttcccggtaagggatggcgactttcagaagcctacgatataaatccggctcccagatctgatggcttgaaactgaatattactgaggcggataacgcgcttgatttggaattagctagggaagttgctgaatactttcgcctgaacttggccgaagctgatgaaattattgccagcttccgggggatagttagtcagtggagaactattgcggacagtcttactcttccttaccgagagcaggaacaaatggcggaggcattcagacgcgcaatgtga

SEQ ID NO: 5066 - protein, 422 aa, Enterobacter cloacae
MAMIGVYADWDGLHGPRRIGFLHSRRTRARELFEFEYDPDALADPELNFLQLDPEIVLFGGAQYPTPPRDKFGVFGDSSPDRWGRMLMKRRLERDIREGLLPEGTQLHESDYLLGVHDLYRVGALRYKLEDEGEFLDNRMDVAAPPFTEIAALERASRSLEDDPDNRALMGHEWLRMLIAPGGSLGGARPKASVADDNGHLYIAKFPSTRDEYDVGGWEMVVNALAVGCGLNVAAAQARKFASDHHCFMVRRFDRTDVGQRLHFASAMTLTRHQDGDDYSTGASYLELAEVLIRNGAQTNADLQELWSRIVFNILVSNSDDHLRNHGFILVPGKGWRLSEAYDINPAPRSDGLKLNITEADNALDLELAREVAEYFRLNLAEADEIIASFRGIVSQWRTIADSLTLPYREQEQMAEAFRRAM

SEQ ID NO: 5067 - DNA, 522 bp, Enterobacter cloacae
atgaagaggttggtttcgattgctattttggcgatggcgctatcaggctgcgggcaagatactgcaacagacaaagtagagaagttcataaaaagcaaagacataagtatgctttcaaaaagcaagatttcacagtgttcagaaaatttcgtcaagaattttcattactttgatgaaaacaccttaccatcaaccaataagtattacgaactgagtgaatacgtatacggaaaagtgaaatttgaaccagtgagtgagaagtcagtcggtgatgccactgaggtaatgatgaaggttagtattccaaagccaatagaggatgcaaaatcattcatttttgctgatgaaagtaacgcttccagtgaagaaatatcagtactaaacaatttgcttgctctctataaacgaggcgacttgaaagatatgcaatactcaaccttcgatatgaaatgggtagtgctttcagatgggatagatccgaactttacacccgaacagataaaaatctgctcacaaaaataa

SEQ ID NO: 5068 - protein, 173 aa, Enterobacter cloacae
MKRLVSIAILAMALSGCGQDTATDKVEKFIKSKDISMLSKSKISQCSENFVKNFHYFDENTLPSTNKYYELSEYVYGKVKFEPVSEKSVGDATEVMMKVSIPKPIEDAKSFIFADESNASSEEISVLNNLLALYKRGDLKDMQYSTFDMKWVVLSDGIDPNFTPEQIKICSQK

SEQ ID NO: 5069 - DNA, 357 bp, Enterobacter cloacae
atgaatattatcgatggtatccaatttaatgattcaaatgaaagtgttgtttttaattactatagttggattgagttaattaaagcgatcattgttaaatatgcgaatgaaacagagagtgaggctgaacgaatagtattagcctctccacttgttcgttttacggaaaatgattacatgtctattgctttgcgctgtcatgaaagtgaatatcattgggcaatgttaattgcttatggtgatcaatattggacaacaggagtttctccaaatgaacctgacggatacttcgagtgggaaaaggaatacaaggaaaaaaataaactggcagaagaaaactttatttttagtgattaa

SEQ ID NO: 5070 - protein, 118 aa, Enterobacter cloacae
MNIIDGIQFNDSNESVVFNYYSWIELIKAIIVKYANETESEAERIVLASPLVRFTENDYMSIALRCHESEYHWAMLIAYGDQYWTTGVSPNEPDGYFEWEKEYKEKNKLAEENFIFSD

SEQ ID NO: 5071 - DNA, 801 bp, Serratia ficaria
atggatatttcgcttcttacaggacaacggactaacgcatggtcagcgaccatgattaatcttgaagctagaaaactcattaacacagcaaacatggtagcggctagccacctcaaagatgggctcaccagaattcagttcatggaagacattaagtctttcatcactgagcaattttctcttgcccgcaaagcgaagtctgaggaagaagggatttcctacataaaaaatctaagggcagagaatgaaaatcttcttgaacaggatcggctactcaggacgaaagctgcacagatttatgccaaagttgaattcatcaaggaaaacaacaaaatcgttggctatgtgatctccgctgtgcagattgtttttgcaggtttacaagccgcaggtggattgatccttgctagttcaatgacacctgtcggggtcttgttgggtgccacattagtgattgatgcggcaaataccgtatccagagaagtaaataatcaattactgaacaaacctgggtcacaagggtttgttgctgacacagcgatgtcagtagcggagtttatgggatttcgcagtgaaacaggtctggcagcctataaaacggtaagtcttgctgcaaatgcgtacagcgtattcggtttacttcgaaaaccaggctcctggcgcctgttttattttatgcgctcagatttttacagaaaaatggactcaatgagtcggccaaaactaactatgaaaatcatcggatatggcataaacgcaaaaatcgttttcgacttactgactattgataatccttcctaa

SEQ ID NO: 5072 - protein, 266 aa, Serratia ficaria
MDISLLTGQRTNAWSATMINLEARKLINTANMVAASHLKDGLTRIQFMEDIKSFITEQFSLARKAKSEEEGISYIKNLRAENENLLEQDRLLRTKAAQIYAKVEFIKENNKIVGYVISAVQIVFAGLQAAGGLILASSMTPVGVLLGATLVIDAANTVSREVNNQLLNKPGSQGFVADTAMSVAEFMGFRSETGLAAYKTVSLAANAYSVFGLLRKPGSWRLFYFMRSDFYRKMDSMSRPKLTMKIIGYGINAKIVFDLLTIDNPS

SEQ ID NO: 5073 - DNA, 984 bp, Enterobacter cloacae
atgaccactctcgttttttcctattcccatgcagatgaagcactacgcaacgaacttgagaagcatctctccccgctgaagcgaaccgggaagatcacaacatggcacgatcgccgcatcgtcccaggccaggagtttgaacgtcagatcgaccactatttttcgcaagcagatatcatcctgctcctgatcagcagtgactttatcgcttcagattactgctatcaggtagagatgaaaaacgcactggagcggcataaccggggcgaggcggtggtcattccggtaattttaagagactgtgcctggcatcagttagaattcggcagcattatggcggcgactatcgacggtaaacccatcactaagtttgccacccatgatgaaggctacgttcaggtcgtcgaggccgtctcgcgtgccattgcccagatggaagcaaaaaaaacacagcaaaccaaacttatcccttcaccggctcagtcgaatccgatgtttcagggagtagattccgtttttacaccgcgttcaagcaacctttctctacccaagaagtttaccgatctggagaaagatcgcgccagacgtgagggctttggatatgttgctcgctattttgagaattcgttagacgaactcaaaaaacgtcatgtcggattagacatcgattttaatcgacttgatacggattctttcacctgtgctgtgtatatcaatggcagtaaggtcggccaatgtggcatctggcgcggcaatcaacatcatggaatgggagatatctgctatagccaggataatgttgttcgaaacagtgttaacgaaagtctgagccttgctgataacggccagactcttggtttccgtgctctgatgggtggcttcagtcgtggaacttcacgagacgaactattgaccaatgaaggtatgtcggaacatctctgggaaatgttttttggactaatcaagcaaagaatgtctcgataa

SEQ ID NO: 5074 - protein, 327 aa, Enterobacter cloacae
MTTLVFSYSHADEALRNELEKHLSPLKRTGKITTWHDRRIVPGQEFERQIDHYFSQADIILLLISSDFIASDYCYQVEMKNALERHNRGEAVVIPVILRDCAWHQLEFGSIMAATIDGKPITKFATHDEGYVQVVEAVSRAIAQMEAKKTQQTKLIPSPAQSNPMFQGVDSVFTPRSSNLSLPKKFTDLEKDRARREGFGYVARYFENSLDELKKRHVGLDIDFNRLDTDSFTCAVYINGSKVGQCGIWRGNQHHGMGDICYSQDNVVRNSVNESLSLADNGQTLGFRALMGGFSRGTSRDELLTNEGMSEHLWEMFFGLIKQRMSR

SEQ ID NO: 5075 - DNA, 900 bp, Enterobacter ludwigii
atgaataacgctctttataatcagatccgcatctttcagagcattgcacgtgaaggaaatatctcggcagccgcgaggaaacttgaaatcacgccgccctccgtcagcaatgcgcttaagttgctggaagagcatattggtcatccgctttttgtgcgcacgacccggcgtattgagctgaccgaaaccgggcaacagttgctggaacaaacggccgccgcggtggattcgctggaaaaatcgctggaaagcattcgcgatcggaatcaggaaccctctggtgtggtaagaattacgctctcgcgtttcgcctatctgttaattctcaagcctgcaatggctgcgttctgtcagcaatacccaaggatccaactggagatttcggtcttcgacggtaccgtgaatattatcgaggagcgttttgacctggggattcgttttggcgatattctggagggtggggtggtagcacggccattaatgaaaccgtttcgtgaagggttatacgcatcctctgcctatctcgctgaacagggtatgcctgaggtgccggcagatctcagtcatcaccgattgattggttaccgttttatcactaacaaccgcatccttccgttgatcctgaacgatcgcggagaacagttaaccgttgagatgcccggacagttaatcagcaacgatattgacgttatggcagacggaattcgtaacggactgggaattgggcgcttgttcgaacccatctggcggttacagccagatcgggaacaatttgtacctgtgatggagagattctggaaaacctatccgccagtgtatctctattacccgaaaaacgcggggaaaacgaaaagggtgaaagccctgattgattttctgatctccgcgaccgagcgataa

SEQ ID NO: 5076 - protein, 299 aa, Enterobacter ludwigii
MNNALYNQIRIFQSIAREGNISAAARKLEITPPSVSNALKLLEEHIGHPLFVRTTRRIELTETGQQLLEQTAAAVDSLEKSLESIRDRNQEPSGVVRITLSRFAYLLILKPAMAAFCQQYPRIQLEISVFDGTVNIIEERFDLGIRFGDILEGGVVARPLMKPFREGLYASSAYLAEQGMPEVPADLSHHRLIGYRFITNNRILPLILNDRGEQLTVEMPGQLISNDIDVMADGIRNGLGIGRLFEPIWRLQPDREQFVPVMERFWKTYPPVYLYYPKNAGKTKRVKALIDFLISATER

SEQ ID NO: 5077 - DNA, 672 bp, Enterobacter cloacae
atgaaaaaagttgtattggcttctatgcttgctatgtgtgtatcatctgcttttgccgcagacaccgccgtactgaaagttacgggcgttctgacaaatggcggttgcacccctgaaatcagcggcggcggcgtggtggattacggcacaatccacctgtcaagcctgaacgccgctacgattaaccagttgggccagaaagatttctctctttctattacctgccctgcgctgaccaaagcgggctttagcgtttctgacgatcgcagtggcactgcgccaaatattgcggttcaaaatggcgcgggtaacgggaatgatattgttcagccgggcaatatgtttggtctgaaccagaccgcagggaaagttaacattggtaactacactatttacgtgaaaaacagtacgattactgcggatagcaccaccgtatcggcgatctttagttctgacaatggcacctcctggtccaacactggtgcactgatggataataatggtactcaggttgtctccgttgctaccacgggtactactactccagttgcgtttaaaaatgtggtaatcccgatgaccgttgccgctgcgattcaggataccaatacgctggctattactgatgataccaacatggatggtcaggcaacgtttaccatcaagtatctgtaa

SEQ ID NO: 5078 - protein, 223 aa, Enterobacter cloacae
MKKVVLASMLAMCVSSAFAADTAVLKVTGVLTNGGCTPEISGGGVVDYGTIHLSSLNAATINQLGQKDFSLSITCPALTKAGFSVSDDRSGTAPNIAVQNGAGNGNDIVQPGNMFGLNQTAGKVNIGNYTIYVKNSTITADSTTVSAIFSSDNGTSWSNTGALMDNNGTQVVSVATTGTTTPVAFKNVVIPMTVAAAIQDTNTLAITDDTNMDGQATFTIKYL

SEQ ID NO: 5079 - DNA, 681 bp, Enterobacter cloacae
atgaaaaaagttattcttgcgactgcgctgtctctttgtgttgcgtcagcgtttgctgctgataccgcagtgttgaaggtaaccggtaagctgacaaatgctgcatgtacgccagtattaagtaaaggtggcattgtagattatggctctatccatttaggcgatctttccccaaccgcagtaaaccagctgggtcagaaaaatatcgacctgactatcaactgcaccgctgcaacgaaagtagcgtggaatatggttgacgatcgtgctgattccaacgcaggtgtcactattgaaaagggtcagtataatggtggcgacattatcagctactctgataccgatcagacctacggcgtaggtaaaacagcgggcggcgtgaaaattggtgactactccatgtttgtcaatattgctagcgttgttgctgatggcaaaaatgttgataccattttaatggacaagggcgcgactgcctgggcaaagagctcgggccaaacccgtgctgctggcattcgtgacatgagcgttgcgacaactggcaccctggagccgctggcattcatcactgcaaccttcccactggttactgcgttggctattcaggataccaccaaactggctattactgacgataccaaacttgatggtcagctgactatcagcctgaaatatttataa

SEQ ID NO: 5080 - protein, 226 aa, Enterobacter cloacae
MKKVILATALSLCVASAFAADTAVLKVTGKLTNAACTPVLSKGGIVDYGSIHLGDLSPTAVNQLGQKNIDLTINCTAATKVAWNMVDDRADSNAGVTIEKGQYNGGDIISYSDTDQTYGVGKTAGGVKIGDYSMFVNIASVVADGKNVDTILMDKGATAWAKSSGQTRAAGIRDMSVATTGTLEPLAFITATFPLVTALAIQDTTKLAITDDTKLDGQLTISLKYL

SEQ ID NO: 5081 - DNA, 171 bp, Enterobacter hormaechei
atgatagcgctgaaacgtttcaagaagtcttgtcttttctacaaaaggttgcaagaaaagttacatttcttgttgcagaatttagaagtgcagcacatttcttcttcagtcgggaggtttttgctgatgttcagcaaacaggttcagcacgcttcagcgaaacggcgataa

SEQ ID NO: 5082 - protein, 56 aa, Enterobacter hormaechei
MIALKRFKKSCLFYKRLQEKLHFLLQNLEVQHISSSVGRFLLMFSKQVQHASAKRR

SEQ ID NO: 5083 - DNA, 669 bp, Enterobacter cloacae complex
atgaaaatatttttagtaacttttctgtttctttttccttttttttcaaatgcaagtgttttttctttagaacctggattataccatctcgaatgggcatatggacctaatgacaattataaaattattgctggcgttgttggaggggttgatgaggttaacggggtttattatttaaaaaataaaaatgatgaccagtctaacgatgaggtatatattgtaatcaataagggttctggtgcttttttcttcaaacatgaggaaattgaaggtgggccaactattgggtgggcaaacttccaattgaatgataaagcaatattaattgatactccaacaacaaagaatttttatgataatacagatggtgatagtgaccgttacataaaatatagggtaggtgttaaattccctggaaataagaaggctaaaaatacatctgaaattgctcctatagaaattttaaaaaatgatgttttcaagatcgactgttctgaatattttaaattaaacgaaaaatacgtaagtaaagcgaaaagaaataatccaatggaagactatagtagtcgtgttttattgagtaatgatggcttgtgtaactccattttaaataagaataataaagttgaggtgttaaaaggttggatgcttttcaagagaattagctaa

SEQ ID NO: 5084 - protein, 222 aa, Enterobacter cloacae complex
MKIFLVTFLFLFPFFSNASVFSLEPGLYHLEWAYGPNDNYKIIAGVVGGVDEVNGVYYLKNKNDDQSNDEVYIVINKGSGAFFFKHEEIEGGPTIGWANFQLNDKAILIDTPTTKNFYDNTDGDSDRYIKYRVGVKFPGNKKAKNTSEIAPIEILKNDVFKIDCSEYFKLNEKYVSKAKRNNPMEDYSSRVLLSNDGLCNSILNKNNKVEVLKGWMLFKRIS

SEQ ID NO: 5085 - DNA, 132 bp, Klebsiella oxytoca
atgcgtttcgcgcctgtctgctcagtcgaggctgacgtggtgtttcatcacccgtttgaagaggctcatacgggcacgcatgaagcggttttcaagccgaaaacctgcatgtttattcacaccgatacgtaa

SEQ ID NO: 5086 - protein, 43 aa, Klebsiella oxytoca
MRFAPVCSVEADVVFHHPFEEAHTGTHEAVFKPKTCMFIHTDT

SEQ ID NO: 5087 - DNA, 273 bp, Enterobacter cloacae complex
atgccaaataaactcgtcggcgggtactgcaccgtcggcaatgatctcttccgcttccttcccgcctacgtcctggcgcatccattcccttgcagcttctggcgacagaaccagcggccgccgatcgtgtatatcaacgaggcctttatccgcagcagaggtcactatgagaaatccctcggcttcatcgccgcgctcaaacggcgtactgccgatcgccgccatgaatatcggctgcccgtcggcccgattgacctgctccccgttgattag

SEQ ID NO: 5088 - protein, 90 aa, Enterobacter cloacae complex
MPNKLVGGYCTVGNDLFRFLPAYVLAHPFPCSFWRQNQRPPIVYINEAFIRSRGHYEKSLGFIAALKRRTADRRHEYRLPVGPIDLLPVD

SEQ ID NO: 5089 - DNA, 690 bp, Klebsiella oxytoca
atgaaacctgcagataaacccgtgctgtgtgtcgtttccagccatccgattaaaggcgcatccggtgtaccaaccggttttttcctggctgagttgacgcatccgctgaaagtactggaagatgccggactaaaaacgacgatagccagcattcgcgggggacagccgccggtggatggatttgacctcagtgaccctgtcaacgcctggttctggaacgaaaccgattttcagcagcgcctggccacaacgcctgcgttatctgagctgaacggttccgattacagcgccgttttctttgcgggcgggcatggaaccatgtgggatttccgcgacagccaggatgcccagcgtattatccgcgaagtgtatgaaagtgatgggattgtcgcagccgtctgccacgggcctgcggcactggttgacgcaaagctcagcagcggcgaatacctggtgaaaggcaaaaacgtggcggcctttaccaacaaggaagaggaagaagttcacaccaccgatgtggttccctacctgcttgagactgcactccgcgagcatggcgcgcttcatcatgaagccccgaactggtctgaaaacgtggttaccgacggacgccttatcacggggcagaatcccgcttcagcgcacggtgtcggtgtggcgctgttaaatgccctccgccagccaacttaa

SEQ ID NO: 5090 - protein, 229 aa, Klebsiella oxytoca
MKPADKPVLCVVSSHPIKGASGVPTGFFLAELTHPLKVLEDAGLKTTIASIRGGQPPVDGFDLSDPVNAWFWNETDFQQRLATTPALSELNGSDYSAVFFAGGHGTMWDFRDSQDAQRIIREVYESDGIVAAVCHGPAALVDAKLSSGEYLVKGKNVAAFTNKEEEEVHTTDVVPYLLETALREHGALHHEAPNWSENVVTDGRLITGQNPASAHGVGVALLNALRQPT

SEQ ID NO: 5091 - DNA, 948 bp, Klebsiella oxytoca
atgaaatctcttccttcagtcgcgctcggcacatggtcctggggcacaggctttgccggtggcgacaccgtcttcggcaatcatctttctgatactcagatggcagacgtgttcaccacggccatgagtaagggtctgaatctctgggataccgcagcagtatatggcatggggagttccgaggcagcgctgggagcattagtccgtcagttcccccgcgaggatatgattttatccaccaaattcacgccgcagattgcgaacgaacagtcagcacagcctgtcagcgatatgcttgaggccagcctcggacgcctgggcgtggacgcgattgatatctactggatccacaatcccctcgacgttgagaaatggacgccaggactgatcccacttttacaaagcggtaaggtcaaacgcgtcggggtttccaaccacaatctggcacaaatcagacgcgccaacgaaatccttaacgcttccggttattccctcagtgcagtacagaatcattacagcctgctctatcgcgcctctgaagaggccgggatccttgattactgccgacaaaataacatcacgttctttgcttacatggtcctggagcaaggcgcgctcagtggtcgttatgattcaaatcatcccatgcctgccgggagtggccgggccgaaagttataacgcagtactgccgcagatagaaagattaaccgccgccatgaaaaaaatgggagccgaaaggaatgccagcgtggcacagatagccatcgcatgggctattgcaaaaggtacccttcccctcgttggtgcgactaaagtccatcacgttctggacgccgcctgcgcttcagacatccagttacgcgatgaggaaatcatcctgctggaacaactcgccacagagaccagagtggatacacgaggcgcctgggaaaaaccgatggtgtaa

SEQ ID NO: 5092 - protein, 315 aa, Klebsiella oxytoca
MKSLPSVALGTWSWGTGFAGGDTVFGNHLSDTQMADVFTTAMSKGLNLWDTAAVYGMGSSEAALGALVRQFPREDMILSTKFTPQIANEQSAQPVSDMLEASLGRLGVDAIDIYWIHNPLDVEKWTPGLIPLLQSGKVKRVGVSNHNLAQIRRANEILNASGYSLSAVQNHYSLLYRASEEAGILDYCRQNNITFFAYMVLEQGALSGRYDSNHPMPAGSGRAESYNAVLPQIERLTAAMKKMGAERNASVAQIAIAWAIAKGTLPLVGATKVHHVLDAACASDIQLRDEEIILLEQLATETRVDTRGAWEKPMV

SEQ ID NO: 5093 - DNA, 375 bp, Enterobacter cloacae
atgtctaagaaagaacggaataatattctacgaatcggtaaagcagcgcaaaaacagcaacagcgattattaatcacttctctcgaagaaatcccaggcacattgatagaacatgttgaagaagtgcattcaacaccgccctctgtggaagagtgggctgcgttaaatgatctcctcgaatgttcaagcggagtttattaccgaccacgtaaacgcaaggtttacacctgggacgatagccagcttaaaaaatggcaaatgttgggcttcacctctttacgccattacctcaattacaacgcaatgaataacaccgtggcgggagccagggattttgatgaactatttcacattggagacagttacacagaataa

SEQ ID NO: 5094 - protein, 124 aa, Enterobacter cloacae
MSKKERNNILRIGKAAQKQQQRLLITSLEEIPGTLIEHVEEVHSTPPSVEEWAALNDLLECSSGVYYRPRKRKVYTWDDSQLKKWQMLGFTSLRHYLNYNAMNNTVAGARDFDELFHIGDSYTE

SEQ ID NO: 5095 - DNA, 528 bp, Enterobacter cloacae
atggacgaaaaacaaattgcattagaggctatgttggcagctaaggactctgcacattgggcgtggtggacaatggctgcgactatattcagtgttctgatttccttgggtactctaggtatggctttcagcgccttggatacttggcgtcagcaagagatgttaaagctgaagatggaattcaagaggtctattcttgaattaatttatgctatggactctatgccaagaaattggtcttatcatcagatcaatttagctcgggcaaggttacaagcatcgcctgaggttgcaaatagagttgctgaccctgcgcagatatacatcaataaaatggctctcaaggatgcattcagtggctcaaccaaagcatggatcatgtgtgaacatctcttctctgaaacagagatcgaagtcttatggaataagtttcgaggtgagtttcgagattacataatgaggggcggcgataccaatcgccttgcaggcattctcgaatcactaaatgtaaaactaaaggttttataa

SEQ ID NO: 5096 - protein, 175 aa, Enterobacter cloacae
MDEKQIALEAMLAAKDSAHWAWWTMAATIFSVLISLGTLGMAFSALDTWRQQEMLKLKMEFKRSILELIYAMDSMPRNWSYHQINLARARLQASPEVANRVADPAQIYINKMALKDAFSGSTKAWIMCEHLFSETEIEVLWNKFRGEFRDYIMRGGDTNRLAGILESLNVKLKVL

SEQ ID NO: 5097 - DNA, 276 bp, Klebsiella oxytoca
atgatttattcagaagctaacgaaaaatgggctccagtcccagtagagctttattccaaagcttacgaagtcagcaatcttggccgcgtgcgcagcattccacgtctggctaattctgaatattttattcggcacatccacggtggctttctcaaaggtcggatgcgtaaagacgggaccaaaaccgttgtgctttcggtacagcgtcagcgtcaaaaatttgtaatcgccgatctggttgcgaaagcatttggggaggtatcagccaatgcttaa

SEQ ID NO: 5098 - protein, 91 aa, Klebsiella oxytoca
MIYSEANEKWAPVPVELYSKAYEVSNLGRVRSIPRLANSEYFIRHIHGGFLKGRMRKDGTKTVVLSVQRQRQKFVIADLVAKAFGEVSANA

SEQ ID NO: 5099 - DNA, 180 bp, Citrobacter freundii
atggcgatgagcagactgtcagttgaaatcaaaagcaggtggtggcttcccgtttacataaagacgctgacactgctctgcttgatgatgcgttgcgagcctgattaccaaaaggtgggtaacttcatcgttaagtatggcattagccagaagttgaagtatgagcctgtaaatagataa

SEQ ID NO: 5100 - protein, 59 aa, Citrobacter freundii
MAMSRLSVEIKSRWWLPVYIKTLTLLCLMMRCEPDYQKVGNFIVKYGISQKLKYEPVNR

SEQ ID NO: 5101 - DNA, 522 bp, Citrobacter koseri
atgaatgaactttcttgttccctcagtccagaacaaagtaagaaaacattcgattatattcgtggtatctggcttgtttttaatagtcaggttcaaagccccaaatggttaaagaaaaatgataacgaagccattgagtgggcgtggtcatatttgtcaaagaaaaaggatataaaaagaaatgttctgtcatggttcaaaccagcagatcttaatgagcgatatattggtgtaatgggcgcgattgattgctgggccatcccgaataaattggatgtgggaaattatagaaaatttctggatgacaaagatgcacttctaaaaaatatgaggaattcctttaagcaacgaaaaagaaggtctggaaaaaatgatttgacaatctctgccaaagccagcaaggaattatctgagttagcagtggcacttgataaaaaagagattagagttattgaaaaacttattcatgatgagtatctaagatataaaagcaagctttttgattacaaaaatccatcataa

SEQ ID NO: 5102 - protein, 173 aa, Citrobacter koseri
MNELSCSLSPEQSKKTFDYIRGIWLVFNSQVQSPKWLKKNDNEAIEWAWSYLSKKKDIKRNVLSWFKPADLNERYIGVMGAIDCWAIPNKLDVGNYRKFLDDKDALLKNMRNSFKQRKRRSGKNDLTISAKASKELSELAVALDKKEIRVIEKLIHDEYLRYKSKLFDYKNPS

SEQ ID NO: 5103 - DNA, 339 bp, Citrobacter amalonaticus
atggctatcagtgagaaagagcttcttgaggcaggtttcagtaaccgtgatgtggatactttactggagcggctttcagcaaccggtggcactatgcagggcttcattgcagcactttcacgacgcttccgggtatcggtatggatcacggtcgcgctcgctctgattatgctggtcattctcatcgccggcagccggacacatatcctgtctggcggcatgagttccctcgttgtcctgaccattgcctggttgacctttccaccggctcttggctggaaagcattccgcctgcagaagaatgcccggggcaggtttcagcaaagtgatagcccgtaa

SEQ ID NO: 5104 - protein, 112 aa, Citrobacter amalonaticus
MAISEKELLEAGFSNRDVDTLLERLSATGGTMQGFIAALSRRFRVSVWITVALALIMLVILIAGSRTHILSGGMSSLVVLTIAWLTFPPALGWKAFRLQKNARGRFQQSDSP

SEQ ID NO: 5105 - DNA, 528 bp, Enterobacter cloacae
atggctcagtatgtcccactcattacttcgtttatagctgtcctcggcgcgcttggcggcgcttgggttgccaacatattcaacgaaaagcgctttcaagcccaagcaagccttgaaaaagaaacacaaaataagaagttaattttagggaaagcagaggagctctatctcctgctgactacctgggataaagatgtgttcaactaccaggcttatcagttagccgttatcaaaggtgagttaacaaaagcacaatttcacaccttcctttccgagttcagtgccagaagcacccatgatcgcttggatactttattgccgctttatttcccagaactaacccctgctatggctgagttaagacgtcatctagactcaggaaataaagcttaccacgcgcatgaaaggaatgatttagataccatagaggcgcgtagattactgaatgcgtcagtcaagagcactggccaggcatttaaagaattgaaaaaatccttgagtgctaaagtccatgggcttatcgaatga

SEQ ID NO: 5106 - protein, 175 aa, Enterobacter cloacae
MAQYVPLITSFIAVLGALGGAWVANIFNEKRFQAQASLEKETQNKKLILGKAEELYLLLTTWDKDVFNYQAYQLAVIKGELTKAQFHTFLSEFSARSTHDRLDTLLPLYFPELTPAMAELRRHLDSGNKAYHAHERNDLDTIEARRLLNASVKSTGQAFKELKKSLSAKVHGLIE

SEQ ID NO: 5107 - DNA, 1308 bp, Enterobacter cloacae
atgaattctgattggaaaatagttaaacttggagatgtctgcactattcgacgcggttcttctcctagaccaattgttgattatatggctcctaagggaatgccatgggttaaaatatctgatgctactgagagcaagtctagatatatatctaaaacaaaagaatttataaagccagaaggtattagtcgtagtgttattgtaaacaaaggcgatttaattctttccaacagtggaacggctggattaccaaagtttatggagataacagcatgcatccatgatggatggcaagtatttactgagctagttgatattgataaagagtttctttattacgtattgttaaatataaggagcaggcttcttcataatgcttatgacagcactatgaaaaacctgaccttagatatggtacgtgatgcacaggtcaggctcccacaaattaaagaacaaaagagaatcgcaggtgttttgtcatcattagatggaatgattgagtgtaatcaaaacgtcaatcaaaccctcgaacagatggcacaggccctgttcaaaagttggtttgtcgattttgaaccggtaaaagctaaaataactgttttagaaaacggtggtactcaagaagatgcgatacttgctgcaatgacctccatttctgggaaagatacgaattctctcattacctttaaatgtgagcatcctaaaaggtatgctgaacttagagaaatggcggaaattttcccatcggtaatgaaaaacagcgactttggatatattcctgaggggtggagtgttgtccggctttcagatatcgctactctacactatggtaaacctttaaaaaaaactgaaagaattgatggttcatacccagtatatggatcaggtggagttacaggttttcataatgaatatcttgtaactggtccaggaattattgttggtagaaaaggatccattggtactatttattgggaggatgattatttcttcccgattgatacggtgtattatgttgtaagtaaaaaagacatacctttaacctatttatattatttactgcatacattaaatcttcataacatgaatacagatgcggctgttcccggactaaatagagagaatgtctatagacttgatgttgtagaaccgtctaaatctgttttagaacttttttcaaagtatgtttccatattcatgaaggatattagacagaatagtgatttgaataaaacattaatagatgcaagggataatattatacccaagcttctttctggagagatctccttgcaggaacatcaataa

SEQ ID NO: 5108 - protein, 435 aa, Enterobacter cloacae
MNSDWKIVKLGDVCTIRRGSSPRPIVDYMAPKGMPWVKISDATESKSRYISKTKEFIKPEGISRSVIVNKGDLILSNSGTAGLPKFMEITACIHDGWQVFTELVDIDKEFLYYVLLNIRSRLLHNAYDSTMKNLTLDMVRDAQVRLPQIKEQKRIAGVLSSLDGMIECNQNVNQTLEQMAQALFKSWFVDFEPVKAKITVLENGGTQEDAILAAMTSISGKDTNSLITFKCEHPKRYAELREMAEIFPSVMKNSDFGYIPEGWSVVRLSDIATLHYGKPLKKTERIDGSYPVYGSGGVTGFHNEYLVTGPGIIVGRKGSIGTIYWEDDYFFPIDTVYYVVSKKDIPLTYLYYLLHTLNLHNMNTDAAVPGLNRENVYRLDVVEPSKSVLELFSKYVSIFMKDIRQNSDLNKTLIDARDNIIPKLLSGEISLQEHQ

SEQ ID NO: 5109 - DNA, 1017 bp, Enterobacter cloacae
atggattatttagacaaacttttcagagagtatcttaatgaggatggcattgttcgtattgccagttctgaattttatagagataatatatttgatgaattagacccgtcagggtatgaagaagcgtttcttgaatggtgtagccaaaggaaagtagacaatatcaagaaggctgatgatatattagctcaacatgagttatctgatagatttttaagaatacgagaaattcactctagaggtatgcttataccttttattggtgcaggaatgtctgctccaagtgactatccagggtggacttcttttctatataaaatacttaatgaaacaagtgttgaaaaatcattgatagatgaatgcatagctgaaggtgattatgaagaggttgctcaaatattatctgatgccttacccgaaggtggctttcttgaacaagttgaaaataaatttggaatagaaaaagaattatccggtgtgatacaaagaattccatttatattccaaacgagtgttgttacaacaaattttgataatgtcatagaacgctgttatgcaagggcatcgattagttttgatgaaatgttattaggttctgaagcagaacatttgcctcgtattcttggcgaggggaaaacagttttgctaaaacttcatggcaaagcaaactcatctaaaaatcgtgtattaacgaagtctgaatataataatcactatcgagacagtcaggagctagaaaaagtaatagaatgcattagccaaaattcattattatttattgggtgcagtttaactacggatagaacgattaaatgtttacagagtatagcgaatcgcaaggggcatgagaatataccaaggcattatgcgtttttgcagttgaacgataatgattcgagaattaaacggcaaaatgaacttcgtcgagctaatatctttccgatttggtatactggagatcatgacgaatgccttgaagccttgttagaaaaactagtagacggggtgaataaatga

SEQ ID NO: 5110 - protein, 338 aa, Enterobacter cloacae
MDYLDKLFREYLNEDGIVRIASSEFYRDNIFDELDPSGYEEAFLEWCSQRKVDNIKKADDILAQHELSDRFLRIREIHSRGMLIPFIGAGMSAPSDYPGWTSFLYKILNETSVEKSLIDECIAEGDYEEVAQILSDALPEGGFLEQVENKFGIEKELSGVIQRIPFIFQTSVVTTNFDNVIERCYARASISFDEMLLGSEAEHLPRILGEGKTVLLKLHGKANSSKNRVLTKSEYNNHYRDSQELEKVIECISQNSLLFIGCSLTTDRTIKCLQSIANRKGHENIPRHYAFLQLNDNDSRIKRQNELRRANIFPIWYTGDHDECLEALLEKLVDGVNK

SEQ ID NO: 5111 - DNA, 180 bp, Enterobacter cloacae
atgtcgaatgagagtaggatatcatctttatcggaatatatggcatgggtgaaagacgccagcaaagaaaaggaggaaaatttaaagcagttagccctgctgtatcttcttgacccggatggactcaagctggagctgcatgttgggggatttagtatcccgactggcgcaatgccgtga

SEQ ID NO: 5112 - protein, 59 aa, Enterobacter cloacae
MSNESRISSLSEYMAWVKDASKEKEENLKQLALLYLLDPDGLKLELHVGGFSIPTGAMP

SEQ ID NO: 5113 - DNA, 519 bp, Enterobacter cloacae
atgaactggaccgagttcgtaattaaacctggattaatattactttctggcgctataacaggattgatcgttgctttttttacggcaagatatgctctgacgagattctataaggaaaagtggtgggaaaagaaactaacagcttttcttgaagttactgagtatatatacaaaatcaagagagctgaagattattggttcgctcagacagagagtacgcagtatcaagatgaaacatttcaggccttatctaaagaggaggaagaagatcttcgttcagaatacgtgaaagggatgaaggagttaacaagaatatctcatttatcttcatttaccttgtcaaaaaaagcttctcaattattgggagaatacattattgagcatgataaaatatatccttcttggtggcaggatgagattgatagttttgaagcatcagaaagaagtcaaatattaattaatacattgcttgagtctattttaattgaagcaaagcgtgagttaaaattaaaagggtga

SEQ ID NO: 5114 - protein, 172 aa, Enterobacter cloacae
MNWTEFVIKPGLILLSGAITGLIVAFFTARYALTRFYKEKWWEKKLTAFLEVTEYIYKIKRAEDYWFAQTESTQYQDETFQALSKEEEEDLRSEYVKGMKELTRISHLSSFTLSKKASQLLGEYIIEHDKIYPSWWQDEIDSFEASERSQILINTLLESILIEAKRELKLKG

SEQ ID NO: 5115 - DNA, 651 bp, Enterobacter cloacae
gtggctagcttaaatgtatttctgagtgttggaagtgtagcaaatagtgaacaagaagcttttgttcaggctgtagaggagcggctcagaagtgaaggtttaacacctctgacacttggacgtagctattttagttctgaagctcccttgaaagccataacagaactaatggatacttgtgagggaacagttgtaattgccctcgaacggttgtattttccttcagggactgaacgcagaggaggtgagaatgaactctttctgtcgcatacaagtatcgctactccctggaatcaaattgaagccgcactttcttacagtcgtgaactgcctttacttgttattgttgcgaaagaggttagaactgaaggtttgcttgaacctggttatgattggtatgtacagcgagttgaaccgaaatctaccgcactacattctaatgagttcaatggcattcttgcaagttggaaaaccaaattaggcgagcaaaaaataaaaaacaagcctaaaattgaatttgaaaagatgacaattggagaaattctttctcatttaaaaccagcgcacgcttggggtattgtttgtatttttacctcaataaccttaggcgcttttgcattaggttcaaaactattcggctggctttcataa

SEQ ID NO: 5116 - protein, 216 aa, Enterobacter cloacae
MASLNVFLSVGSVANSEQEAFVQAVEERLRSEGLTPLTLGRSYFSSEAPLKAITELMDTCEGTVVIALERLYFPSGTERRGGENELFLSHTSIATPWNQIEAALSYSRELPLLVIVAKEVRTEGLLEPGYDWYVQRVEPKSTALHSNEFNGILASWKTKLGEQKIKNKPKIEFEKMTIGEILSHLKPAHAWGIVCIFTSITLGAFALGSKLFGWLS

SEQ ID NO: 5117 - DNA, 327 bp, Enterobacter cloacae
atgaatacaactaaccattacaacgatattttttgccgtcgcctgaagcaggctcgactggcaagcgggctttcacaaaaacgcctggggattgcagcgggtattgatgaatttgtcgccagtacgcgtatcaatcggtatgaaaagggtgtgcatgaaccgggaacggaaattgtgcagaaactggccgaggttttgcgagtgccgttggcttacttttatgctgaagatgatgatttagcagagttgatgttggtttttttgtctttatcaaaggaggaacgtattgaagttatttctcatgtgagaaaaaaaattaatgaataa

SEQ ID NO: 5118 - protein, 108 aa, Enterobacter cloacae
MNTTNHYNDIFCRRLKQARLASGLSQKRLGIAAGIDEFVASTRINRYEKGVHEPGTEIVQKLAEVLRVPLAYFYAEDDDLAELMLVFLSLSKEERIEVISHVRKKINE

SEQ ID NO: 5119 - DNA, 309 bp, Enterobacter cloacae
atgcgattccagacaacgtttctactattgattttactcttaccaacactggtgaacgcctccccggaatccacccagctcgcccttgcgctgaaacaactcaacggcgtgaaaacctcgctggaacgcgctcaaaccagcgccagcaccgatccgcagtcgcgctacttcttcgactacttacaggcgcagcaggacatcaccgccgttgaacaaggcatccaccgctaccttagcccggcaagagcacagccgcacgccgtacagcccctgagcgccagctaccagcgggagaaccccgatgactga

SEQ ID NO: 5120 - protein, 102 aa, Enterobacter cloacae
MRFQTTFLLLILLLPTLVNASPESTQLALALKQLNGVKTSLERAQTSASTDPQSRYFFDYLQAQQDITAVEQGIHRYLSPARAQPHAVQPLSASYQRENPDD

SEQ ID NO: 5121 - DNA, 348 bp, Citrobacter freundii
atgaagcgtatgaagttagttctgacaatttcgttactgatctcctgctcagcggctttcgctgatttgcaatgcggcggataccgacttcatgcagctgataacggttggactaaaatcaacggtgaacaggtaacatctcagaagattaaatttcttggtaagaaagatgactgggacaacgttaaaactgacatgggcctgatgccttcccgtgatggaaataattacggttttgagtttgtgaagcgtaacggaaaagctttcctgaacgtccagctgctgcagaacagtatggacgcgccgaaaatcatcggttctttcccgtgtaaaaaagtcgctgggtga

SEQ ID NO: 5122 - protein, 115 aa, Citrobacter freundii
MKRMKLVLTISLLISCSAAFADLQCGGYRLHAADNGWTKINGEQVTSQKIKFLGKKDDWDNVKTDMGLMPSRDGNNYGFEFVKRNGKAFLNVQLLQNSMDAPKIIGSFPCKKVAG

SEQ ID NO: 5123 - DNA, 234 bp, Enterobacter cloacae complex
atgccgtatgaactgtctcacctgaataccttgtgggatgcactggggaaaacaacggtcagggatgaggacggtgatgttgtgaccgacgaacccttcctgcatttcccggcaggtactcctctcttccatatctggtcatggtttgaatccctgcacgacgggttcgtcgttgccgtgaaactgtacaacacatcccctcccgacgcgtcaacagacaggaaaagcaaatga

SEQ ID NO: 5124 - protein, 77 aa, Enterobacter cloacae complex
MPYELSHLNTLWDALGKTTVRDEDGDVVTDEPFLHFPAGTPLFHIWSWFESLHDGFVVAVKLYNTSPPDASTDRKSK

SEQ ID NO: 5125 - DNA, 570 bp, Citrobacter koseri
atgaataccaccacttgtcctcccggcagtggggaaatatctcccactgtacagcgcaccatcagacgtgcactgaccttactggaacgccagttacgcgagcccggagttgcatttacctccagccaggcggtccgcgactggcttcgtctgcagctcgccacgctggagcgtgaggtattcatggcactcttcctggataaccagcatcgtcttattgctcatgaaacgctctttaccggcaccatcaaccatacacaggtacatccccgtgaagtgataaaggcagcactgaaatacaacgcggctgccattgtgctttcgcacaatcatccgtcaggttatgcggaacccggtcatgtcgaccggctgctcactgaccatctgaagcaggcatttccggcactgatgaaacagatggagctcatgctgaccagtagcgaactcacgccccacattcagcgctgcattacgctccacgcaaaagggctgatatgtgaggccgatacgctcggctcctgtggctatttgtacatcgtaatttatccgacatctgcaacaaccgcataa

SEQ ID NO: 5126 - protein, 189 aa, Citrobacter koseri
MNTTTCPPGSGEISPTVQRTIRRALTLLERQLREPGVAFTSSQAVRDWLRLQLATLEREVFMALFLDNQHRLIAHETLFTGTINHTQVHPREVIKAALKYNAAAIVLSHNHPSGYAEPGHVDRLLTDHLKQAFPALMKQMELMLTSSELTPHIQRCITLHAKGLICEADTLGSCGYLYIVIYPTSATTA

SEQ ID NO: 5127 - DNA, 375 bp, Citrobacter koseri
atgcaaaaacaatccctgtcccctcatagggcggcctcgtcacgtctgtcgtcagtcgaaatatggcgaaaattactgaagtatctgctggagcaacactacggtctgatgctgaacgacacaccgtttggcaacgacagtgtgatccagaagcacattgatgcgggcatctcactgtgtgacgcggtgaattttatcgtggaaaagtacgacctggtgcgtactgaccgtcacggcttcagcgtgaaagagcagtctccgttcatcggcagcattgatatgctccgcgcccggaaggctaccgggctgatgacccgcaagggctatcaaaccgttactgacatcacaggcggcagattcagcggagggaaataa

SEQ ID NO: 5128 - protein, 124 aa, Citrobacter koseri
MQKQSLSPHRAASSRLSSVEIWRKLLKYLLEQHYGLMLNDTPFGNDSVIQKHIDAGISLCDAVNFIVEKYDLVRTDRHGFSVKEQSPFIGSIDMLRARKATGLMTRKGYQTVTDITGGRFSGGK

SEQ ID NO: 5129 - DNA, 321 bp, Enterobacter cloacae
atgctgcgggaatgcctgtggatagccgtacattaccgggataacgaagcggtactcacccgacagttccggctgctgaccgtgttactgtatctgggcggttattttccgcaagggaataccgatggtatgctcccggagaaatgtttcattttactgaacgccccggaattaagctctctcctggcagacgatacggcccctgatgttctggtggcgttctgccgcaccctcttctactgcagacagatatctccgctaaggtgttaccgccatacccgctgtctgagcgaacatctgtataaactgatggagatctga

SEQ ID NO: 5130 - protein, 106 aa, Enterobacter cloacae
MLRECLWIAVHYRDNEAVLTRQFRLLTVLLYLGGYFPQGNTDGMLPEKCFILLNAPELSSLLADDTAPDVLVAFCRTLFYCRQISPLRCYRHTRCLSEHLYKLMEI

SEQ ID NO: 5131 - DNA, 990 bp, Citrobacter koseri
atgaaaatcaacatcgatatcagcgtcatcattcctgccttcaatgcagctgacagcatcggagctctggtccatgcactgcttggcgaaacaacgctcagtgctgaaatcattgttgtgaatgacggttcaaccgacgaaacatggacggtactcagcgccattacagatgaacggcttattctcattcgtcaggaaaatcagggtgtgtatgcttcccgtaatgctgcactggcgattcaccgtggcgaatgggtggtgttcctggatgcggatgaccgggttgcggcagattttctgcaggaacggttgcgcacagcccgcgaagcgcaggccgatgtcgtccttttcaatgcccggcatacagacagcgccggacatctgcgacatcccgttcaccgcagacagccttacggtcagacgctgacgggtcagcagtggatacgccattgcgtcagtcagagggagtggccgcattacctgtggctgcagataatccgttcagcgtatatccgcgagcatgacctgcgattccaggaagggaaaagccacaaggacattctctggacgatacagcttgccgccgcagatggccggttttatttctctgacaggcaggattacctgtgggtgaataacccggcgtcaattacccaccgcccggattattacgatatccgcgcgttcagctatagcgacgtgattgcagatattctggcactcagtacacagacgcagtaccgggcagtcagacgagcactggtcaggcatgcactggtggaaagccgtcactttctgggcctgtaccggcgcagggtgaatgaccggcacgcggtccgggcgcgttttcgtgagcggataagctttcgccatctggtacccggcgtgagcaacatgagcgatgtctttttcctcctgaagctggtccgcaatatttatctgcctggtgtccgcaatactcccgcagccgtttcgcaggtgcggcgttaa

SEQ ID NO: 5132 - protein, 329 aa, Citrobacter koseri
MKINIDISVIIPAFNAADSIGALVHALLGETTLSAEIIVVNDGSTDETWTVLSAITDERLILIRQENQGVYASRNAALAIHRGEWVVFLDADDRVAADFLQERLRTAREAQADVVLFNARHTDSAGHLRHPVHRRQPYGQTLTGQQWIRHCVSQREWPHYLWLQIIRSAYIREHDLRFQEGKSHKDILWTIQLAAADGRFYFSDRQDYLWVNNPASITHRPDYYDIRAFSYSDVIADILALSTQTQYRAVRRALVRHALVESRHFLGLYRRRVNDRHAVRARFRERISFRHLVPGVSNMSDVFFLLKLVRNIYLPGVRNTPAAVSQVRR

SEQ ID NO: 5133 - DNA, 366 bp, Klebsiella oxytoca
atgaaaattccccagcagatggcaaccgactccttcattcaggtagacaggatttccccctaccggagccaacccggactcccctggcagaagactctgcctgtgaatgccattcttgaagatttttcgctcacgctgcgtcagcacgagcgtgtaggcctgctgggatgttcgggctgcggaaaatcgacattactgaaagttatcctggccctcgaccctgtgggtttccggtgtggcgccattgacgggcatcacgatgatccccggcgttccggtgagtcccagcgcctccgccagattgctgtttttctcaaggagtgcggaatggtcgcccggagccagggtggtgagccccgcttttga

SEQ ID NO: 5134 - protein, 121 aa, Klebsiella oxytoca
MKIPQQMATDSFIQVDRISPYRSQPGLPWQKTLPVNAILEDFSLTLRQHERVGLLGCSGCGKSTLLKVILALDPVGFRCGAIDGHHDDPRRSGESQRLRQIAVFLKECGMVARSQGGEPRF

SEQ ID NO: 5135 - DNA, 303 bp, Citrobacter rodentium
atgggccagtatcaccgccgccgcattgaaatacagggcgcgtttgaccacctcccggggatgcacctcggtgcggttaatcgtgccggtgaagagcgtttcatgggcaatcaactgattctggttgtccagatacaacacccggaactcttcccgctcaagcgcggccatatgcagtcgcagccattcacgtacggcgtgggtagaggtgaaggctacgccgggctcatgcaggtggcggtccagagccctgagcgcccgctgaatgagacgccggtcctgtggcgtcatctcgccgggtaa

SEQ ID NO: 5136 - protein, 100 aa, Citrobacter rodentium
MGQYHRRRIEIQGAFDHLPGMHLGAVNRAGEERFMGNQLILVVQIQHPELFPLKRGHMQSQPFTYGVGRGEGYAGLMQVAVQSPERPLNETPVLWRHLAG

SEQ ID NO: 5137 - DNA, 450 bp, Citrobacter rodentium
atgtctaattctttgatgagttctgcgcaaactagctcaaaggctcgaatagtacgggtcgtgggtaagatcaaagttgttcgttctagtaagcagcgacaaacctgtgctgagtccatatttcaggaaagacagatgaacatcaggattcgagctgctcttggacacctcaatgaaaaaaactctttatacaataaaaacaatcgacataaaactttgggcgttttttttgcacgtatcatctcgcacaaaaatctggccgaaaactcgcaaggtaatgcgtctaaatcaactaaaagtacctcatccggctcaagcgaaggtagtgaccctgaccctgaagcttattcaagcttggctttttcgttttctttttggtcctttctttcccttctaatttcattactttttgtatatgcctgcatctcaatcattgaggtggtagcatga

SEQ ID NO: 5138 - protein, 149 aa, Citrobacter rodentium
MSNSLMSSAQTSSKARIVRVVGKIKVVRSSKQRQTCAESIFQERQMNIRIRAALGHLNEKNSLYNKNNRHKTLGVFFARIISHKNLAENSQGNASKSTKSTSSGSSEGSDPDPEAYSSLAFSFSFWSFLSLLISLLFVYACISIIEVVA

SEQ ID NO: 5139 - DNA, 186 bp, Enterobacter cloacae
atgaaatacttcgatattgatactactgtgctatctctcattaaaggggaagtgacacgccaccagattaaatcactacgtaactctaatcgtaagcagggctattcagaacgcgccgagtttttcacggaagtgctacgccgcttcgatttaatcagaagcgcaacaaaagaaactaacgaataa

SEQ ID NO: 5140 - protein, 61 aa, Enterobacter cloacae
MKYFDIDTTVLSLIKGEVTRHQIKSLRNSNRKQGYSERAEFFTEVLRRFDLIRSATKETNE

SEQ ID NO: 5141 - DNA, 384 bp, Enterobacter cloacae
atgagtacaagacaaagaaacaacttagtgcgtattgagaaagcagtacgcgccagcaaacgtaaatacagccgtcagttgaaagaacatgcaactgaatccatccctggggagtggatcaccgaaataatagaataccctgcaacggtgccaaccggatcagagtttgaactattgcaggatgttttagcctcttcggataacgtcttctataaaccacgccgccgccgtgaataccgtgttgattcatcgaaccttaagaagtggcagttatacgcagaaaactatattgactggcgggaatatatccgcactaacgggctatcccaccacacacaagactttgacattctctttgacgataaggaaatcacacatgactaa

SEQ ID NO: 5142 - protein, 127 aa, Enterobacter cloacae
MSTRQRNNLVRIEKAVRASKRKYSRQLKEHATESIPGEWITEIIEYPATVPTGSEFELLQDVLASSDNVFYKPRRRREYRVDSSNLKKWQLYAENYIDWREYIRTNGLSHHTQDFDILFDDKEITHD

SEQ ID NO: 5143 - DNA, 345 bp, Enterobacter cloacae
atgactaatacatacagcaccattgaaactatgattctgaattttgaagatgattggcatctgccaacattgtctttagtgaatcaggcgcatgtatcaggaacgccctccgcgctcttggaagcggtgcaacacactgaacaggcaatcaccgcccttgaacatctgcaaacgtctgtagctcgtttggtgcagcgtgacggcagtacgatcacaccagaagaagcctggcgtgtagctaatgaccttgaagagctggcttgcagcctccagtggatcaccgctgaactgggagagcttagcctcgacattgccaaggtttatggcatgattcagcgtgaataa

SEQ ID NO: 5144 - protein, 114 aa, Enterobacter cloacae
MTNTYSTIETMILNFEDDWHLPTLSLVNQAHVSGTPSALLEAVQHTEQAITALEHLQTSVARLVQRDGSTITPEEAWRVANDLEELACSLQWITAELGELSLDIAKVYGMIQRE

SEQ ID NO: 5145 - DNA, 615 bp, Enterobacter asburiae
atgaagcaaccgtgggagctaaacccagctctaacaatagagcgacttaaacaacttgcatccctaattcgaaatgtcagggatgatgtgattgatttacataatgaagagcttggtgattctgctcgctcaactgggctgagggcctatgaatgttgccgaacgaggataattcgtgctgcaactcaatttgaagagtggccctggcttggcatagtgaaagacgatgggaaatttaccttttctattgattcagtgccagtccgtttgtaccggggaggccctaatcgcccggaagagcgcaggctgataccttgcgtagaagcgctgagtcagatgagtttattgcctgttgaagtaggcaacgctgcttcagttatttggttttttgctgttgaagttgatgatttacgctatgttgagcgtgtaacctttactggctttttagaaggcgtgcaggtttcatgctgggaaattcctttggatgaaagagttcctgctttcagctccattgataccgaattacctgagccagtcaaaactcagaaagcatcaatctctgttaaaaggaaagataaaaaggccgagaatgattactcgaataatggttcgtaa

SEQ ID NO: 5146 - protein, 204 aa, Enterobacter asburiae
MKQPWELNPALTIERLKQLASLIRNVRDDVIDLHNEELGDSARSTGLRAYECCRTRIIRAATQFEEWPWLGIVKDDGKFTFSIDSVPVRLYRGGPNRPEERRLIPCVEALSQMSLLPVEVGNAASVIWFFAVEVDDLRYVERVTFTGFLEGVQVSCWEIPLDERVPAFSSIDTELPEPVKTQKASISVKRKDKKAENDYSNNGS

SEQ ID NO: 5147 - DNA, 750 bp, Enterobacter cloacae
gtgttgttggaagcggtatcgatagaaggcgcccaagtatgggcggagcgatttcgtcaggacactgcggcgacagcggtggtgtgtggagaggtgtcgatcagctatagcgccagcatgggggtggctctccttgacccccgtttgcactctgtcgagcaggtgatgctgcaggcggacagcgcgctctaccaggcaaaaaagacgagggtgcaaccaagttgtgggcgcacaagtatttcagaattgagaggagtggcgatgaaggaaaagcaagcagacccgatcaaaacatttcgcgcccaatgggcagtgatgacgttctacgagcgctttgaacaggtgatcgcgctcgcgctgtccgcaatcattgccgttatcatcgtggtctcgctgctgcagctgatctcgatcgtcttcagcctgctgatcattgatgcattcaatccgctcgatcacaaggtcttccagaccgtgttcggcatgatcatgacgctgctcattgccatggagttcaagcattccatcgtgagggtggccttgcggcgcgacagcatcatccaggtcaagacggtgatcctgatcgggctgatcgccctggcgcgtaaattcgtaatcctcgacccggagaccggccccgccaaggtcgcggcgcttgcaggcgcgacactggccctcggggcgacttactggctgctgcgcgagcgcgatgaccggacagccggggaaagctcagatgatcagtcgtga

SEQ ID NO: 5148 - protein, 249 aa, Enterobacter cloacae
MLLEAVSIEGAQVWAERFRQDTAATAVVCGEVSISYSASMGVALLDPRLHSVEQVMLQADSALYQAKKTRVQPSCGRTSISELRGVAMKEKQADPIKTFRAQWAVMTFYERFEQVIALALSAIIAVIIVVSLLQLISIVFSLLIIDAFNPLDHKVFQTVFGMIMTLLIAMEFKHSIVRVALRRDSIIQVKTVILIGLIALARKFVILDPETGPAKVAALAGATLALGATYWLLRERDDRTAGESSDDQS

SEQ ID NO: 5149 - DNA, 963 bp, Enterobacter cloacae
atgatcagtcgtgatctgcgccacgcgcagaatgtcggcgcgcggcatcgctggcacaatcgcctgcaaaccgtgctgttggtgctgaccctgctcggaattgccgccgtcgctggcagcctgctgttgggtgacggcgggctttggctggcgcttgcggctgcggggttcaccctgctgcttgaaccggcggccgcctccgggctgaccttgcggctgtatggcgcacgccccctgcacccggatgaagcgcccgatctttgggctgtgttgcgcgaactggcggcgcgggccgggctgcctaccgtgccggtaccgcactacgtgcccagcggggtcgtcaacgccttcgccaccggttcgaagcatcacgcggccatcgcgctgaccgacggcctgctgcgtagcctcacgccccgcgagttgaccggcgtgctcggccacgaaatcgcgcatattgcgaacgaggatttgcgtgtcatgggcttggccgattccatcagccggctcacccatcttctggccttgttggggcagcttgcgatcgtgctcagcttgccaacgctattgcttggagtcacggaagtcaattggcccgcgttgcttctacttgcggtcgcgccacagctggccttgctggctcagttgggcttgtccagggtgcgcgaattcgacgccgaccggctcgctgccgaattgaccggcgacccgcacgggctggcctcagcgctcgccaagatcgagcgggtgagccgctcctggcgcgcctggctgctgcccggatggggcaatccggaaccctcctggttgcgcacgcatccagcgacggctgaacgcattgagcgcttgctggaacttgctccgccgcccgcgatgccgccgtttccatcggcccgtttcgaccccgaagtgaccgtatcaccacgtccgccacgctggcgcactggcggcctttggcgctga

SEQ ID NO: 5150 - protein, 320 aa, Enterobacter cloacae
MISRDLRHAQNVGARHRWHNRLQTVLLVLTLLGIAAVAGSLLLGDGGLWLALAAAGFTLLLEPAAASGLTLRLYGARPLHPDEAPDLWAVLRELAARAGLPTVPVPHYVPSGVVNAFATGSKHHAAIALTDGLLRSLTPRELTGVLGHEIAHIANEDLRVMGLADSISRLTHLLALLGQLAIVLSLPTLLLGVTEVNWPALLLLAVAPQLALLAQLGLSRVREFDADRLAAELTGDPHGLASALAKIERVSRSWRAWLLPGWGNPEPSWLRTHPATAERIERLLELAPPPAMPPFPSARFDPEVTVSPRPPRWRTGGLWR

SEQ ID NO: 5151 - DNA, 267 bp, Klebsiella aerogenes
gtgcagagtaggcagagcaaagagtttattcagatcgtgggaatgatcggcattgaggtgatgcacgctaccgtgggagtgaaacaacaatggatcgtgctcattcagtggttcatcgctgtcgtgttgatggtcactgatggacgttgtttcctgaacgctgtatgcagcctgtggctttgccataaacgaactgctcagcacggcaacagccatgatgataagcacgattctggaaatgacttcacggctgataaacacagttaa

SEQ ID NO: 5152 - protein, 88 aa, Klebsiella aerogenes
MQSRQSKEFIQIVGMIGIEVMHATVGVKQQWIVLIQWFIAVVLMVTDGRCFLNAVCSLWLCHKRTAQHGNSHDDKHDSGNDFTADKHS

SEQ ID NO: 5153 - DNA, 831 bp, Citrobacter amalonaticus
atgacagaagatatgcagccacgatctattgagacaaaattcagaaaacttttagggacagtaaacccacatttaattctgattgatgtagcagtaaaggaactcctttgcaaagatgaatctggccgcattaacattaatcgaattgaagacgtaactaaaaagcataaaaatgcaaaactaaaagttgcacatttagagatttacaaaacatctctctacgtaacacaaagtcatattgcatttatatatagctgcctagaatcatttttgaaagactacatttccttgtcaaaaaaaatatatagtgatgaacggtcattcaatattgataatgtagacatactacgtagagcaattcaccatgctcatgtgaacaaaataaatggtaagattacgcatcctaaattaaaccataatgagttgtcaatttacattgatgaacttgatttaaaattattggattactttagacttgttcgtaatattaacgcacatagccgagaaaacactaatctttgggaagaaatgttttcagaatctgacttaattaaaatgagtaaaaaatacaagcatgaagttaataaagaagctgaattaacaatacgtgatgtaattctgtattctcaggtatgccaacaggtcgcccaccatatctgccaaaaaatgttagacattgaaaaaatcgcaaaatcactttgcataaaatataaacaccttactggtcctcgtaaagacaatgcaatcacaaagacattaatcaacaattacttgcaagataaagatgaggttgatagactccggaatgcatttaatggctggttagcttag

SEQ ID NO: 5154 - protein, 276 aa, Citrobacter amalonaticus
MTEDMQPRSIETKFRKLLGTVNPHLILIDVAVKELLCKDESGRININRIEDVTKKHKNAKLKVAHLEIYKTSLYVTQSHIAFIYSCLESFLKDYISLSKKIYSDERSFNIDNVDILRRAIHHAHVNKINGKITHPKLNHNELSIYIDELDLKLLDYFRLVRNINAHSRENTNLWEEMFSESDLIKMSKKYKHEVNKEAELTIRDVILYSQVCQQVAHHICQKMLDIEKIAKSLCIKYKHLTGPRKDNAITKTLINNYLQDKDEVDRLRNAFNGWLA

SEQ ID NO: 5155 - DNA, 639 bp, Citrobacter amalonaticus
ttgactgagctaactactaagcgccctgatactgaactagctcatctcgcctggtgcatcatcgtagcggtaaagcttgcacggaaagagggaagatctctcacgtctcttcaaacacacatgttcataatgcagtggctttcaaccgctcagaaacgcaaggtttttcctaaatctctggcgcctgacataatctggttacaggaacaagggaaactgaaagggccatcagcacggctttacagcaaggtggagtatatctggctggcaagctctggtgagttagccaatcagagcacgctgtttagattcacctgcatgattgacacgctacgttcaatgggctggcaggatcacctattatccgataccgagtggcaggatggttggaaatgcggtacagatgtatcggctgtgtatacacagaaatctcaactccatagctcatttacagaatcaggaaatcttatattgccacttgaggtgcgtgtaactggcgttccagacgggatatttccattattggagcagtgcgggctcaaaactgagaaattgcctgtgagtatgggttatactgtcctgattttacagccagagattgatttaagttccgtgaagcaagatatcgttgaatattaa

SEQ ID NO: 5156 - protein, 212 aa, Citrobacter amalonaticus
MTELTTKRPDTELAHLAWCIIVAVKLARKEGRSLTSLQTHMFIMQWLSTAQKRKVFPKSLAPDIIWLQEQGKLKGPSARLYSKVEYIWLASSGELANQSTLFRFTCMIDTLRSMGWQDHLLSDTEWQDGWKCGTDVSAVYTQKSQLHSSFTESGNLILPLEVRVTGVPDGIFPLLEQCGLKTEKLPVSMGYTVLILQPEIDLSSVKQDIVEY

SEQ ID NO: 5157 - DNA, 1347 bp, Citrobacter amalonaticus
atgtccaacactaccgaacgccacctcaagaccggaaacgatcctcgcacaatgcctgattattcagcgctacgtgatgagcttgccaaactctcccatcctgcccgtccggatgtgaattgggggaatgttgaaaaactggcattaaaccttttcgataccaatggtgtcgagcttcagacagctgcgtggtataccctggcaagggcacaacaggcgggtatacagggtttcaatgaaggtatggcgattctggatgccctgatacgctaccaatggtcagcaatgtggcccgcttctgcacatgccagaatagaaatacttagcagcctgagtaaacgtcttcagcagctgtaccggactttttcccttcagaaggaggatttaccaggcctgaaccagggcataaggcttttgagctcaacaggtgaagccttgcaacggctcgaactccacaatgcaagcggatttgagccgcttcgtcagatgctgcaaaacacaactatcaggctggagaatagcgatgtcccctcaagccagacagagagcaatctaacagatgtagcactacctgttagggctgaaaggcagaataggcagcgctgggtatatgtggtgaattctgaaccagcagttgaagttgaagtaatcagaaaatcatccaccaggatcactccattagtggcttacttcggcggtattttaacagctgccgtactgggcatactcgcctttatttttactccaatagtattcagccaccccggagaagatgcgttgaacaactctctcgcagctttaccgtccagcatgcctcttccggctgtagataagctacgccaggacgccccgacgtggcttgaatccagtgatacctatgcaaaaaaattaacttcccgtctgaacgaactgagcattcttccaccgtattggccattgcaatacggtaatcagttggtagaacaaacgcgccatctttaccctaacaccaaatttgcagaggaggtgtcggctgactggcggtcaaagctgcaagccaatagtttgcccaatgccaccatttcaggttggtataggggagtatctgagcttcagacgcttcaggacagacttaatcaactcgacgagaagaagggcaaatacctgaccgttagtgagcttaaaactgctgtgttctctatatcaaagtccttaaacgaaagcgtgccagttgaagaattaatccggcaactgcaaaattccccgcaggatcaaccgctgtcccgagacctgctcaaccgggcagatctacagctcaggcaactgaataactcctacatcatggccacgtcaaacaaccaaaaatag

SEQ ID NO: 5158 - protein, 448 aa, Citrobacter amalonaticus
MSNTTERHLKTGNDPRTMPDYSALRDELAKLSHPARPDVNWGNVEKLALNLFDTNGVELQTAAWYTLARAQQAGIQGFNEGMAILDALIRYQWSAMWPASAHARIEILSSLSKRLQQLYRTFSLQKEDLPGLNQGIRLLSSTGEALQRLELHNASGFEPLRQMLQNTTIRLENSDVPSSQTESNLTDVALPVRAERQNRQRWVYVVNSEPAVEVEVIRKSSTRITPLVAYFGGILTAAVLGILAFIFTPIVFSHPGEDALNNSLAALPSSMPLPAVDKLRQDAPTWLESSDTYAKKLTSRLNELSILPPYWPLQYGNQLVEQTRHLYPNTKFAEEVSADWRSKLQANSLPNATISGWYRGVSELQTLQDRLNQLDEKKGKYLTVSELKTAVFSISKSLNESVPVEELIRQLQNSPQDQPLSRDLLNRADLQLRQLNNSYIMATSNNQK

SEQ ID NO: 5159 - DNA, 144 bp, Enterobacter cloacae
atgaaacaggcgggcctgatatcaggcccgccttcacaggggaaagaggatgacgggtatgaaggtaaaggcgcgttattgcggcgcatccgtcctgataccggtggccagcaggctggcgccaagaatgtagacggggtctga

SEQ ID NO: 5160 - protein, 47 aa, Enterobacter cloacae
MKQAGLISGPPSQGKEDDGYEGKGALLRRIRPDTGGQQAGAKNVDGV

SEQ ID NO: 5161 - DNA, 333 bp, Enterobacter cloacae
atggacacttttttcatcatccagtggtataggctccgggccatcaacatatttttcccatcccaacgctttcccatcatacagaaccttaatttcaccgttaaagctttcgcataccgtgacaaccgaatgccgaagtcgatatccccggccttcactgcgaatctgaaacgcactgcttttgtactggaaagtgagatttttggagagaacgcgcttcgcctggaggctgaagatataacccagttcctcttcagaatggtgtacatcaagatgggcgttatcagcaatacgaggcggcgtagcaaactgttaccaacggtgcaaaactga

SEQ ID NO: 5162 - protein, 110 aa, Enterobacter cloacae
MDTFFIIQWYRLRAINIFFPSQRFPIIQNLNFTVKAFAYRDNRMPKSISPAFTANLKRTAFVLESEIFGENALRLEAEDITQFLFRMVYIKMGVISNTRRRSKLLPTVQN

SEQ ID NO: 5163 - DNA, 666 bp, Enterobacter cloacae
atgaataatatcaatttaattagaagtgaaacaaccaaaggtattcatgtaattaaaggtaaggcactcattgatgatattttgagttattctattttgcatttgtcgcgccacattcaattttgtcacgaattctttttgaagaaacatagccttgtcttcataaatacccctaacttctggactgaattgccatcgttagaagaaaagattaaaagaagagaatatgaagttgttattattttagtggatagtgattatattgatttttatcgctcattaataaatcacccatacgtcattgcaattccgatgagtgaatctctggaaaacataaagagtatgatttccagagaaataaataaatacaccccacaaagagcaaataaaaaagaaaagctaacaccaagggaaaaaaatattttgtatttaacctctcttggctggagcaacaaagaaatagctctcatcttagacgtttccaataaaacgatattctctcataagagaaaaataatggataaagttaatttaaaaagacccaatcaaatgaataaggtcttatcggaattaatgcctgctcagcatagaaaaaacataaccactaacatctgcgatattgagggagtggatgggggcaaactagctccccacccactagtttga

SEQ ID NO: 5164 - protein, 221 aa, Enterobacter cloacae
MNNINLIRSETTKGIHVIKGKALIDDILSYSILHLSRHIQFCHEFFLKKHSLVFINTPNFWTELPSLEEKIKRREYEVVIILVDSDYIDFYRSLINHPYVIAIPMSESLENIKSMISREINKYTPQRANKKEKLTPREKNILYLTSLGWSNKEIALILDVSNKTIFSHKRKIMDKVNLKRPNQMNKVLSELMPAQHRKNITTNICDIEGVDGGKLAPHPLV

SEQ ID NO: 5165 - DNA, 594 bp, Enterobacter asburiae
atggtttcgccacaagtgaagtttgttgtggttggtcatcattcccggatagggcatgcacaacgtcttgccacgatgttggatgctcatctgctgattgacgatggtaaccatggcgcgaactggaatcatcgacgcgcccttgaatgggcagcagaacaaacatgccgggtaattgttgttgaagatgatgctcagccttcaagcagtcttaatgggttgatgataggtcactggctaaaccgcttccctgattctctggtgagtttctatctcggtacaggccgaccacctcagtaccaaatgcagatagccgagcggctgattgttgctgataaaactcaggctgactacatcactctgccgcgactgatacacggggtgtgctatagcgtacctccgcaacatatcaaccgcgtgctgtctcgatgggataacagtaagcccgctgattatgccgtgggtgatgcctggggtggtgcagtggtctatccgtgttactcgctggtggaccatggagactttgaatcagtcgagtgtcaccctgactcagcaccacgaacagaacgccgcagggcgtggagattagcctga

SEQ ID NO: 5166 - protein, 197 aa, Enterobacter asburiae
MVSPQVKFVVVGHHSRIGHAQRLATMLDAHLLIDDGNHGANWNHRRALEWAAEQTCRVIVVEDDAQPSSSLNGLMIGHWLNRFPDSLVSFYLGTGRPPQYQMQIAERLIVADKTQADYITLPRLIHGVCYSVPPQHINRVLSRWDNSKPADYAVGDAWGGAVVYPCYSLVDHGDFESVECHPDSAPRTERRRAWRLA

SEQ ID NO: 5167 - DNA, 201 bp, Citrobacter rodentium
atgcgaaaaaaaccattaacgatttgcgtcgggatgtcgattctggcgctaaacggctgcgcatcgccgcaacctgccctggagtgcccaaagccacctccacctccggcgtggatgatgcaggagcccccgaacttactccagacgctcgacggaattatttcgatcaccgggacggaatcgcaaccgctgacaagatga

SEQ ID NO: 5168 - protein, 66 aa, Citrobacter rodentium
MRKKPLTICVGMSILALNGCASPQPALECPKPPPPPAWMMQEPPNLLQTLDGIISITGTESQPLTR

SEQ ID NO: 5169 - DNA, 654 bp, Enterobacter asburiae
atgagcactattaccaaagaatggctgcagcagaaaattgccggcatggaagccacccgcgatgaaatcccgttcggactaggcgaagatggaaccaacacgctggcggctctgcgtatcgcgctggaatcgctcgaagcggaggctgtgtgcgttatcgaccagtccaatcttgattatctcaatgctggctctgatgcagacgtatggcctgtatccagaacagaaatgggtgatgtgcttctgtatcgcacctcccctccagcgccggtatctgtgcctgatttgctcgagcagtttgctgaatttatggcggcagaatctattaagtctggtgattatccagatgggtggcagagtaaggcttcaaacgctgctcatgaatacgcgcaaaacatccgcgccgccatgcttcagggtaccgatgacaactctccggtgattccggatggttgggtggcttgcagtgagaggatgcctgaggaaggcagcaaggttatagttttccgacctcgtgccagtgagtcaaatgacccgccagtaaaaacggcaacatacaagggtgggcgtgagtattatcacggattcgactgttattgcgagccaacccactggatgccactgccagcagcaccgcagcaggaggtgaagtga

SEQ ID NO: 5170 - protein, 217 aa, Enterobacter asburiae
MSTITKEWLQQKIAGMEATRDEIPFGLGEDGTNTLAALRIALESLEAEAVCVIDQSNLDYLNAGSDADVWPVSRTEMGDVLLYRTSPPAPVSVPDLLEQFAEFMAAESIKSGDYPDGWQSKASNAAHEYAQNIRAAMLQGTDDNSPVIPDGWVACSERMPEEGSKVIVFRPRASESNDPPVKTATYKGGREYYHGFDCYCEPTHWMPLPAAPQQEVK

SEQ ID NO: 5171 - DNA, 1308 bp, Klebsiella oxytoca
atggcgcttgccagacaaaaactcacctttgaacggttgcgtaaattcgagctgactgacggaaaatcacaagagtttctttgggattcagacgtaacaatgctggcttgccgtgtaactaaagggacaaaagcatttatcttccagagtgtgtttcttggtaaaactctacgtatgacgattggcaagattagtgactggaaaattgatgatgcccgtagtgaagcacggcgacttcagacgcttatagatacagggatagatcccagaattgctaaggccgagaaaattgctgccgtagaatcacagcaggctgaatcacgcagagggaaagttatgttctctgccccatgggaagaatacctaaaggaactgaaaacgggcatcagtgccaaaactaaacgcccttattctccgcgataccttgcggaccatatcaggctttctgaccgtggtgggaatgtcagaaaggtgggtggtggtttaactattgccgcgccgttagcatttttccttgatttaccgctatctgaaatctctccagttctcattacagagtggctaacaagggaaaggcagacccgcccaaccgttacggccaatgcttaccgtatacttcgtacattcttgaaatgggtaaatgaccataagctgtatcaaggcattattctttccgacatcacgcaagatcgcaatgtcagaaaaatggttccggtttcagccagcaaggccgatgactgtcttcaaaaggaacagctggaaggttggttcgcagaagtaaagcggctaagcaatccggtgatctcaacttatcttcaagttcttttgctgacaggtgcaaggcgtgaggaaatcgcatcccttagctggtccgatattgatttcaaatggtccagtatgcgtattaaagataaggtcgaaggtgaacgaacgattccactgacgccatatgtctcatctattttgtgtgaacttgccaagctttcgaatgttgacactagtactgacggctgggttttctgtagtgatagtaagagcggtagaattgttgagccgcgaaaggcgcataatcgagcattaagtcaggcaagcttgccacatatcagccttcatggtttacgtcgtagcttcggtactctggccgaatgggtcgaagtgccaacaggaattgttgctcagataatggggcataaacctagtgctttagcggagaaacactatcgccgccgcccattagatttattaaggaaatggcatgaaaaaattgagaggtggatcttacagcaagcaaattttgcaaaaaaataa

SEQ ID NO: 5172 - protein, 435 aa, Klebsiella oxytoca
MALARQKLTFERLRKFELTDGKSQEFLWDSDVTMLACRVTKGTKAFIFQSVFLGKTLRMTIGKISDWKIDDARSEARRLQTLIDTGIDPRIAKAEKIAAVESQQAESRRGKVMFSAPWEEYLKELKTGISAKTKRPYSPRYLADHIRLSDRGGNVRKVGGGLTIAAPLAFFLDLPLSEISPVLITEWLTRERQTRPTVTANAYRILRTFLKWVNDHKLYQGIILSDITQDRNVRKMVPVSASKADDCLQKEQLEGWFAEVKRLSNPVISTYLQVLLLTGARREEIASLSWSDIDFKWSSMRIKDKVEGERTIPLTPYVSSILCELAKLSNVDTSTDGWVFCSDSKSGRIVEPRKAHNRALSQASLPHISLHGLRRSFGTLAEWVEVPTGIVAQIMGHKPSALAEKHYRRRPLDLLRKWHEKIERWILQQANFAKK

SEQ ID NO: 5173 - DNA, 276 bp, Citrobacter koseri
atgagaggtaaatttcgattcacaacaataactggcgatgatgatcgtgttgttgtgattcacagtagaagcgttacctaccttgaatcctacgatagtggggcgggcggtgaggtggtgagaattgttttgaacagcggccactcaatttatgcaagcggctcgctggaagatgttatgaccgagctatatggccgatctcttaaaggacaagcggccgaactttaccggtcttcagcttgctttcttcggaagctttttcggaaacaagcttga

SEQ ID NO: 5174 - protein, 91 aa, Citrobacter koseri
MRGKFRFTTITGDDDRVVVIHSRSVTYLESYDSGAGGEVVRIVLNSGHSIYASGSLEDVMTELYGRSLKGQAAELYRSSACFLRKLFRKQA

SEQ ID NO: 5175 - DNA, 498 bp, Enterobacter cloacae
atgaacccggaatcggtccgcatttatctggtcgctgccatgggtgccaatcgggttattggcaatggtcccgatatcccctggaaaatcccaggtgagcagaagatttttcgcaggctcaccgagagcaaagtggtcgttatgggccgcaagacatttgagtccataggcaagcccttaccaaaccgccacacagtggtgctctcgcgccaagctcgttatagcgctcctggttgtgcagttgtttcaacgctgtcacaggctatcgccatcgcagccgaacacggcaaagaactctacgtagccggcggagccgaggtatatgcgctggcgctaccgcatgccaacggcgtctttctatctgaggtacatcaaacctttgagggtgacgccttcttcccagtgcttaacgcagcagaattcgaggttgtctcatccgaaaccattcaaggcacaatcacgtacacgcactccgtctatgcgcgtcgtaacggctaa

SEQ ID NO: 5176 - protein, 165 aa, Enterobacter cloacae
MNPESVRIYLVAAMGANRVIGNGPDIPWKIPGEQKIFRRLTESKVVVMGRKTFESIGKPLPNRHTVVLSRQARYSAPGCAVVSTLSQAIAIAAEHGKELYVAGGAEVYALALPHANGVFLSEVHQTFEGDAFFPVLNAAEFEVVSSETIQGTITYTHSVYARRNG

SEQ ID NO: 5177 - DNA, 918 bp, Enterobacter cloacae
atggggactccagaaaactaccaccttaagggctatgtagaccactcactaccaggtcaaatcgagacgttacataaggcgacgttttctagcaaagaggaagtacttacatccagcacgctctcacctgaagatgttttcattttagtcgaaagactccactgggcttcaattagtggcaatataactcatcatcttgaagaaggtgcatctaaagtaatactaaaatatccattttcgcaattctgggaaataatcactgactcattcgctatcgcccagtactctaatgagtacggaattgcgttccaacatgatttaaaatcaaagctaaagctggagagccttaactttccccacttcattcgaattatactttcagcacattcgatcggcgaggaatttgatagcataagtattccccctcacaatgctgatattgggcatttcgagtgtcgagcggatataatttctcatgcagcttatatagagggtatgctttacaagataataactgacagcaaaaaaaccacatataatcttgctgataaaatgacatataatagaaaaatagatttttgcgaaaaggagaaactactaagcaatgagcttctttcaattgtcaaattgctgaaagatttgagaaatcaagctgcgcatcagttttcgtttgagaaatgcggcccaacaggaaactatcttaaaattaaccccgtcagcgataagttattagaggagataaagagttttgtatgcgcctgcgaaaagcggtactctttgaaggaagggaggataaatcgctttgacaatgtttttcgaatgcttgcaggagagttaaatgccaaagccaatttggcccaaatgataaccttaggaaaacaatacccagccgagctatcgagttacttctacggataa

SEQ ID NO: 5178 - protein, 305 aa, Enterobacter cloacae
MGTPENYHLKGYVDHSLPGQIETLHKATFSSKEEVLTSSTLSPEDVFILVERLHWASISGNITHHLEEGASKVILKYPFSQFWEIITDSFAIAQYSNEYGIAFQHDLKSKLKLESLNFPHFIRIILSAHSIGEEFDSISIPPHNADIGHFECRADIISHAAYIEGMLYKIITDSKKTTYNLADKMTYNRKIDFCEKEKLLSNELLSIVKLLKDLRNQAAHQFSFEKCGPTGNYLKINPVSDKLLEEIKSFVCACEKRYSLKEGRINRFDNVFRMLAGELNAKANLAQMITLGKQYPAELSSYFYG

SEQ ID NO: 5179 - DNA, 465 bp, Enterobacter cloacae
atgactggcaaaataagctggacaaccactcatcctgatggaacggtatcaaagtttgaagctgaaagcgcagcattgaacaacactgacatggggaaccttaagtccttcgtagaatcaatccccagaacaacttcatcaccagaaaaaaaggaagctaagcattccaaagttgttggaatttcatttcttatattatttatagcgttaaacattggatatatgtttacccctgaaaaattcatacaagatcataatctactaatgatattcatattcttatgtatcatagtagtggggatttattccttatgcgcacatttgatttttgaaaacaacactatctctattagcattctcattttaagccttgtatgcattgctttaacaacaaaagtaaccactataaataatatttacaaaacaactgaaaaatctatcattgagaaaacgaaagataaataa

SEQ ID NO: 5180 - protein, 154 aa, Enterobacter cloacae
MTGKISWTTTHPDGTVSKFEAESAALNNTDMGNLKSFVESIPRTTSSPEKKEAKHSKVVGISFLILFIALNIGYMFTPEKFIQDHNLLMIFIFLCIIVVGIYSLCAHLIFENNTISISILILSLVCIALTTKVTTINNIYKTTEKSIIEKTKDK

SEQ ID NO: 5181 - DNA, 231 bp, Enterobacter cloacae
atgagcaaatatttagaactggatcgtctagtcctcaacaaaatcggcgataatccaatccatctcattaagatttacgtccgagatgttttaaatgaatcagaatgcatagccactgcggaagggaaatcatatccctaccgcttcgtcgatcggcacctgcaagcattacgtataagcgccgttatacgcaacgtgacaagtaagctgggtgtgaacatgaatgaataa

SEQ ID NO: 5182 - protein, 76 aa, Enterobacter cloacae
MSKYLELDRLVLNKIGDNPIHLIKIYVRDVLNESECIATAEGKSYPYRFVDRHLQALRISAVIRNVTSKLGVNMNE

SEQ ID NO: 5183 - DNA, 474 bp, Enterobacter cloacae
atgttagagcccgctactttctcagctattgcagcctcttgtgcagcaatagccgctgcaatcaatgcttatgtaggttatcaaaatagaagtgatgctttagataagcaaattattgactcactcacaaaaaaagcagatgaatgtaatgcaattgtcgtaagacataattataaagtgcctttaaaagaggaaaacattggagagacacttagaataatttctttgctttatctttccattgcagatattaaaagaattgataaacgctacaaacatcttctgaagtatgatttctttataaataccaacaatgtgaagaaaattaacttcaaggaatacttcgtatactccctccacccttcaatatttgaagatttaaagattgatgggaaaaataaagaattttcgaatgtcgtaccattggaaaaaatgcgatctatatcagagttctataaaaaacagttacggtga

SEQ ID NO: 5184 - protein, 157 aa, Enterobacter cloacae
MLEPATFSAIAASCAAIAAAINAYVGYQNRSDALDKQIIDSLTKKADECNAIVVRHNYKVPLKEENIGETLRIISLLYLSIADIKRIDKRYKHLLKYDFFINTNNVKKINFKEYFVYSLHPSIFEDLKIDGKNKEFSNVVPLEKMRSISEFYKKQLR

SEQ ID NO: 5185 - DNA, 567 bp, Enterobacter roggenkampii
gtgttgccctgcagcagcccggcgttgttcagggtggtgtggtgcagggcgagcgcgccgccggagagcagcatgcccgcctgctggttgctgagctgtgccccggtcgccgtcagggagtgtgtcccctgcagcgtgccgccgttggtcaccgacgcgctgttaaactgcgcgtcggtaccggccatcagcccgctgttcgtcaggctggcggtggtcagcgtcaggccgtcccgggcaattacccgcccgtcggcatcgttgctggcctgtcgggtcaggttcagcagcagcgcggtggcgctgagctcgccgctgttggccagtgtgtcgccgccgagcgtcagcgttccgctgctgcgcagcgcgccacggttagtgaggtctgccacgccgagcgtcagcgccgagtccccctcgacggtgccctggttttgcaggctgtccgccgtgatgtggaggtcgctggccgcaatattgcccgcgttagcaaacgcagtgccgttcagggtgagccggtcgtccgccagcagacgtccggtatcggtgttggtcaggctgaggtag

SEQ ID NO: 5186 - protein, 188 aa, Enterobacter roggenkampii
MLPCSSPALFRVVWCRASAPPESSMPACWLLSCAPVAVRECVPCSVPPLVTDALLNCASVPAISPLFVRLAVVSVRPSRAITRPSASLLACRVRFSSSAVALSSPLLASVSPPSVSVPLLRSAPRLVRSATPSVSAESPSTVPWFCRLSAVMWRSLAAILPALANAVPFRVSRSSASRRPVSVLVRLR

SEQ ID NO: 5187 - DNA, 345 bp, Enterobacter asburiae
atgttctgtccgctgagcgcgatggcgctggcggtaagctctccgccgctggtcaggtcgccggttgcgttaaaactcagcgcgttaccggtggatttcccggcgtgcgcaatcgtgcccgccgtcaccgacagagcacccttcgccgcctgcgtgccgttcagcgcggcattctgcgcctgcagggtaagcccctgcccgctctgcagatgcgcatcccggccggtggtcaggtcgccggtgctgacggttaaggcccccgccgcgtccgtctgcccgttcaggctggcgctgcgggtcgcggaaatctgtacattgccctggctggtggtgcgggacgcctga

SEQ ID NO: 5188 - protein, 114 aa, Enterobacter asburiae
MFCPLSAMALAVSSPPLVRSPVALKLSALPVDFPACAIVPAVTDRAPFAACVPFSAAFCACRVSPCPLCRCASRPVVRSPVLTVKAPAASVCPFRLALRVAEICTLPWLVVRDA

SEQ ID NO: 5189 - DNA, 234 bp, Enterobacter cloacae
gtgagccacttcagcaggcgcattggccgcatcaacgagctcctgtacttctttgctggcaccgtatcgacgtacgacaccagtgaattcttcgacgtcgtgtccgcgcagtgtaagcactggctgcccggtctctttgttgaacttaggcgcgccgaaatcatcggtggcctgggcgatatggtaaagctcatgctctaccagtgcgcagaattcgaggtcactgcattgtga

SEQ ID NO: 5190 - protein, 77 aa, Enterobacter cloacae
MSHFSRRIGRINELLYFFAGTVSTYDTSEFFDVVSAQCKHWLPGLFVELRRAEIIGGLGDMVKLMLYQCAEFEVTAL

SEQ ID NO: 5191 - DNA, 258 bp, Klebsiella michiganensis
atgctttacgcgctagtgtgtcgttttttttgtggcgaagagtgggcaagaagcggatcctcttgttatcccttcgatgtcgtcgtaatctcataccctgtaaacaaaaaaaccaccgctaccaacggtggttcgtttgccggaattcagagctaccaactctttcttccgaaggtaactggctttcacggagcgcaggtaccaaaactgtccttccagtgtagccgcagtcaggccaccacttcaagaactctgtag

SEQ ID NO: 5192 - protein, 85 aa, Klebsiella michiganensis
MLYALVCRFFCGEEWARSGSSCYPFDVVVISYPVNKKTTATNGGSFAGIQSYQLFLPKVTGFHGAQVPKLSFQCSRSQATTSRTL

SEQ ID NO: 5193 - DNA, 210 bp, Shigella boydii
atgaagaaaattttactatttgttgtggtactgctgccgctggcggctcatgcaggaaaaatcaccataagcaaccccgacgaacaagaattacagggcgggaaaaggctttgcacttacgaaaacagcatttatctgtttacgctggtgactcgctcgcaatcctgccctttctcaaaaacgttcgatacaaatgataatgaaaagtga

SEQ ID NO: 5194 - protein, 69 aa, Shigella boydii
MKKILLFVVVLLPLAAHAGKITISNPDEQELQGGKRLCTYENSIYLFTLVTRSQSCPFSKTFDTNDNEK

SEQ ID NO: 5195 - DNA, 564 bp, Escherichia coli
atgactttgagtattaccgatatccagcgcattaacgcgctggctcataagcacctaaagaacaatgaagagattgcagcggagacaggtcataccctgaccgatattgatgctgtaatccgtggcgtctatgtcgatgacttggccgaacattggaaagacgatgctgatattactctggcggagtacaacgccatccgcagccgctataagcccggcaagttgcaccgcgatacagagtttatgattgcccgcgatatgctgattcgccctgagactgtgctggctatcgcccattcccgctttagcaacgtccacacgcacccagtgccgaaagccgtcaaagcaaagccggagaaagcgaaagtagtgcgcaagttagtgcttactgatttagatgaaatccacaagttagagcgcttcggttggcctgctgcggagatcgccgggaagctgggcgtccctgttgaggtcgtcgcgcatgtgcaacgctgcctgagaaatcgttggtcgtacccggatactctggagtctgttaactccaaattcagcgaggctgaatga

SEQ ID NO: 5196 - protein, 187 aa, Escherichia coli
MTLSITDIQRINALAHKHLKNNEEIAAETGHTLTDIDAVIRGVYVDDLAEHWKDDADITLAEYNAIRSRYKPGKLHRDTEFMIARDMLIRPETVLAIAHSRFSNVHTHPVPKAVKAKPEKAKVVRKLVLTDLDEIHKLERFGWPAAEIAGKLGVPVEVVAHVQRCLRNRWSYPDTLESVNSKFSEAE

SEQ ID NO: 5197 - DNA, 738 bp, Enterobacter cloacae
atgcatattctagaacaatatctccgaacagtgttattgcaggaagatagaatcacagattatgaaagggaacaacacccctataacattccagctttgaaaaattttcattgtatggatctgcatccgcgggtaacttttctcatgggagaaaatggtagtggaaaatcaactttggttgaagctattgcaatagccgcaggatataatgcagaaggagggtcacgtaattttaattttcattcaaatgaaagtcattcttcacttcatcatgcaattcgactagtaagaggagtaaggcgaccaaaagatggattctttttcagagctgaaagtttttataatgttgcaacagagattgatagtttaggtgtgcaaggagcctatggtggacgttcccttcacgaacaatcgcacggggaatcttttatgtcattattattgaaccgctttgcaccgaatggcctgtatattttagatgaacctgaggcagctttatcacctaccagacaaatggctgcgctcgctcatatccatcgcttggctcagagaaattcacaatttataatagcaacccattctcctatactaatgtcatatccagattcgaaaatattgcattttagtgaaaacgggattgaatctattaaattagagaatacagaacattacattgtgactcgtcggtttgtaaataatcctcaagctatcttaaatgagctcttcgactatgattaa

SEQ ID NO: 5198 - protein, 245 aa, Enterobacter cloacae
MHILEQYLRTVLLQEDRITDYEREQHPYNIPALKNFHCMDLHPRVTFLMGENGSGKSTLVEAIAIAAGYNAEGGSRNFNFHSNESHSSLHHAIRLVRGVRRPKDGFFFRAESFYNVATEIDSLGVQGAYGGRSLHEQSHGESFMSLLLNRFAPNGLYILDEPEAALSPTRQMAALAHIHRLAQRNSQFIIATHSPILMSYPDSKILHFSENGIESIKLENTEHYIVTRRFVNNPQAILNELFDYD

SEQ ID NO: 5199 - DNA, 255 bp, Enterobacter cloacae
atgaaactcgcaaaatatttctgctgttttatggtaatgtttaatactactgtatttgctgctgaggaaattgatgcggaaaatgcaagtaaatataccaaaattggaacgttatcagtgactgaagatggttttacaatgtctgacgatgatctttcgcaaaaggttgatgaaaagggaggaaagtactacgttattacttcgaaggaaggaaaagaagagcataagactattaacgctgacatctacaagtga

SEQ ID NO: 5200 - protein, 84 aa, Enterobacter cloacae
MKLAKYFCCFMVMFNTTVFAAEEIDAENASKYTKIGTLSVTEDGFTMSDDDLSQKVDEKGGKYYVITSKEGKEEHKTINADIYK

SEQ ID NO: 5201 - DNA, 306 bp, Enterobacter cloacae
atgagcaaattacgagtttggcacatcccacaagtaccaatgaaggcatttaccgttgaagtccagagcgtggaagaaggcgttcggctgatgaatgccctggctgattacgacattttccagtacgaaaacaacatcaagcctgactactgcaacgccaatggactgcaaatctgggatgaaatcctgaccgatgaagaaatggctgatatggaactcaaagaccgctgggttgactggtacagcgagtatttcgacgacccgcgggattatctggaaagcctgaagcagggagagctgtcatga

SEQ ID NO: 5202 - protein, 101 aa, Enterobacter cloacae
MSKLRVWHIPQVPMKAFTVEVQSVEEGVRLMNALADYDIFQYENNIKPDYCNANGLQIWDEILTDEEMADMELKDRWVDWYSEYFDDPRDYLESLKQGELS

SEQ ID NO: 5203 - DNA, 279 bp, Klebsiella oxytoca
atggaaaacgaaacaataaagtgcccgttctgtttcaaagagagccagttcggagtacgtgtctgcactggctgtcacgcaacaattaactatggtgttgtttcaccgtggcttgctttactaataggaattgtgctgttagcgattgctttcctcatattcgctatcagtgaaagctttatattaactgtcgttatctattttgccacagcaatttttttaagattttatttacgtaagaaatttgcacacagagccgttttcacacataaaagctaa

SEQ ID NO: 5204 - protein, 92 aa, Klebsiella oxytoca
MENETIKCPFCFKESQFGVRVCTGCHATINYGVVSPWLALLIGIVLLAIAFLIFAISESFILTVVIYFATAIFLRFYLRKKFAHRAVFTHKS

SEQ ID NO: 5205 - DNA, 363 bp, Enterobacter cloacae
atgagcaaggaagtcgagaaactcaatgaccatcagctggctgacctgaaaaacgctgtcgaaagagagctcaaacggcgcgctgatgggccaaaagtcaccacgtattacgttgtctcgtgcatcacaaacgctcagcattttactgatatggactgcgctctgcgttgcttaaagcgcgtggcggaggaccttattgaatgggtagcggaagaccaggaaaaccgggattacgtaaatcgatgcactggcattgttggagcgaaactccaggttgcagagatgaatatcgaccacttcaacatgcgtgttgcagagaaatatttcgatgacgattgctacccaccggaggccgcccaatga

SEQ ID NO: 5206 - protein, 120 aa, Enterobacter cloacae
MSKEVEKLNDHQLADLKNAVERELKRRADGPKVTTYYVVSCITNAQHFTDMDCALRCLKRVAEDLIEWVAEDQENRDYVNRCTGIVGAKLQVAEMNIDHFNMRVAEKYFDDDCYPPEAAQ

SEQ ID NO: 5207 - DNA, 369 bp, Enterobacter cloacae
atgggtaaactaaagactctacgccctcggttaaagtccattgatacccgacgcattaagccagtgtatggcgagaatagacgaataagcggcagtgcaagggtaggactcaagcgcaggatatatgtccgagatggtggccattgctgcatgtgtggccgcgtagtggatctgcatgacagcgagcttgaccaccgaatagcactacagtttggtggcgataatgagaccacgaacctgtggactctctgtattgagtgtcattctgggaagtcgtcccgtgaagcagcagcaggtcagccagatgccgaggcgctcaagcattcggtgccgtcaggtgaagggcaggccggaatcattgtgatctga

SEQ ID NO: 5208 - protein, 122 aa, Enterobacter cloacae
MGKLKTLRPRLKSIDTRRIKPVYGENRRISGSARVGLKRRIYVRDGGHCCMCGRVVDLHDSELDHRIALQFGGDNETTNLWTLCIECHSGKSSREAAAGQPDAEALKHSVPSGEGQAGIIVI

SEQ ID NO: 5209 - DNA, 552 bp, Enterobacter cloacae
atggcaacaccaattctatctgacttgattgcagtggatccatcatcttcaactggattgcggtggattgtggcaaggggtaggcaaaaggccggtagcgaagccggttgcttattcaacagcggcacaaaccaatattatgtcgtccgcatcaataaagttctctattacgctcacagaattgtttgggaattaaccaacggcaagattgctggagatttaaccatcgatcacattgatggcaatggcctaaacaatgcaaaagagaatttgagggtggcttccttcgccttgaacttgaggaaccgaaggaaaagcgactccagagaatcggtatctgttggtgtcagtttgaataaaagagagcgcgataagggctacaaagctcattatcgtgggcttgatggaaagaaacattttaagttcttcgggttctcaactcatggcgagaaaagagcgcttgaactcgcaatcgagtggagaaaggaaaggatgcttgagctcaatgaggctggcgcgggatacacgtcgcggcatctttccggtgaataa

SEQ ID NO: 5210 - protein, 183 aa, Enterobacter cloacae
MATPILSDLIAVDPSSSTGLRWIVARGRQKAGSEAGCLFNSGTNQYYVVRINKVLYYAHRIVWELTNGKIAGDLTIDHIDGNGLNNAKENLRVASFALNLRNRRKSDSRESVSVGVSLNKRERDKGYKAHYRGLDGKKHFKFFGFSTHGEKRALELAIEWRKERMLELNEAGAGYTSRHLSGE

SEQ ID NO: 5211 - DNA, 378 bp, Enterobacter cloacae
atgaacttagatactcttgaataccttctgcgggatggtgaagaaatcatccgggaatctgcacgtgaaaatggagtaaacgaagaaagtgcaattggggttgccaaaaaagttataggtgaacggagcgctgttggccttatcggaaagcaaccctacgtttttgaaaaagcaatattgccactaattgaaaatgtttcatgtatcggttggttcgacgaatacgatggcgataatggttctaattttgattgtaaggctcacatcgaagaagcacgactaactcactgctatcgtgaagaccgtatgctctgcgaaagctgtgaggaagaggaagactatcgcgcagcaagaaaagctgattacatgcgagaataa

SEQ ID NO: 5212 - protein, 125 aa, Enterobacter cloacae
MNLDTLEYLLRDGEEIIRESARENGVNEESAIGVAKKVIGERSAVGLIGKQPYVFEKAILPLIENVSCIGWFDEYDGDNGSNFDCKAHIEEARLTHCYREDRMLCESCEEEEDYRAARKADYMRE

SEQ ID NO: 5213 - DNA, 198 bp, Klebsiella oxytoca
atgaggaaatccgaagttattaaacatttcggaggtgtctgtaaaaccgcgaaagcattagggattaaacatccctctgtatccgaatggcctgaaataattcctgaggttagggcttatcaggttgaaaaaataaccaacgggcgtttgaagttcgatcagtctctttatccgaattctactgatatagcctcgtag

SEQ ID NO: 5214 - protein, 65 aa, Klebsiella oxytoca
MRKSEVIKHFGGVCKTAKALGIKHPSVSEWPEIIPEVRAYQVEKITNGRLKFDQSLYPNSTDIAS

SEQ ID NO: 5215 - DNA, 285 bp, Klebsiella oxytoca
atgacctataagctggctttcaacgaatccgctctgaaagaatggaagaagctgggtcatacactacaggtacagttcaaaaagaaactcaaagagcgcctggagaaccccagagttccggcatcacagctacatggacgtaaggaccagtataaaattaagctacgtggtgccggatatcgccttgtctatcgtgtagaggacgacattgtcacagtcactgttatcggcgtaggcaaacgcgaaaacgacgacatttataatgcaacccttaatcgcaattga

SEQ ID NO: 5216 - protein, 94 aa, Klebsiella oxytoca
MTYKLAFNESALKEWKKLGHTLQVQFKKKLKERLENPRVPASQLHGRKDQYKIKLRGAGYRLVYRVEDDIVTVTVIGVGKRENDDIYNATLNRN

SEQ ID NO: 5217 - DNA, 609 bp, Enterobacter cloacae complex
atgacgggtcagcaggcggatctccctgtcgaacgggaaagcgtaacttacgctggtaatgtcactggtagaggacaggtcaaacccggcataacactccattccggccagatcctcttcggtatagtcgagcgcacaggcatcccatgcaccggcgcccatccacggcgtggagccctgacaccagatattgaaacgtttggtcagcatttccacccattgcgacggtatgccccgcgctttctggattgtggattccagtttcgccgcgtcaacggacacatgcaggttagggttggccttgatccacatctcaggctgctcaacctcgctttcgtcgtccagctcgtagatcaggacaaacagcgaatcgttgctctcttccccggcaagaatctggcagcagtagtcgtaatgctgtttacaggcggagacaacgttactcccggcggtcgtgatggcgaacaaaatcgcctcaggacgtgcgcccatacccagctcaagcgcggaataaacgccgttatccgggtgaaggtggtattcatcgacaattgccaggctggggttagtcccctcaatggtggccgctttcgccgccagcggctttaa

SEQ ID NO: 5218 - protein, 202 aa, Enterobacter cloacae complex
MTGQQADLPVERESVTYAGNVTGRGQVKPGITLHSGQILFGIVERTGIPCTGAHPRRGALTPDIETFGQHFHPLRRYAPRFLDCGFQFRRVNGHMQVRVGLDPHLRLLNLAFVVQLVDQDKQRIVALFPGKNLAAVVVMLFTGGDNVTPGGRDGEQNRLRTCAHTQLKRGINAVIRVKVVFIDNCQAGVSPLNGGRFRRQRL

SEQ ID NO: 5219 - DNA, 678 bp, Citrobacter freundii
atgactgaagaaattagcaacagcaatagcaatagcaactatcccaataaagaaaaaaaatggaaaataatcatcaaaaatatttttttctttattgcatgtttaattgctctttcaattagcatattttatctaatcaagaacgtaaaacattatctaaaacctctaagcaccgatataatccctgattacattagcatcctccctattattgcaggcggtctttttatagcactatggtatatttaccgaggtaaatccgttaaatcattaaatgatgcaatattatttgcatcagcaagctatgctttatatttatttttattcgattatgaattttataaaagttttacagatttgcagtacattgcagaacacctctatcaaattggtataaaagttttaatacttatttcaactgttggtaaaactttaataacaatagtcgaatttataaatgacagacataaagaaaaccaggtaataaagcaaaagaaattgaatgctgaacccaaaaatgatggaccttcggcttctgttatgaataatacaccatcaaatactgcaataccagacttaataactcacaataacttttattacaaattagttctatttgtagcgattggaatgacaagtgcaccttgggtttttatttatttacgcgactatatttaa

SEQ ID NO: 5220 - protein, 225 aa, Citrobacter freundii
MTEEISNSNSNSNYPNKEKKWKIIIKNIFFFIACLIALSISIFYLIKNVKHYLKPLSTDIIPDYISILPIIAGGLFIALWYIYRGKSVKSLNDAILFASASYALYLFLFDYEFYKSFTDLQYIAEHLYQIGIKVLILISTVGKTLITIVEFINDRHKENQVIKQKKLNAEPKNDGPSASVMNNTPSNTAIPDLITHNNFYYKLVLFVAIGMTSAPWVFIYLRDYI

SEQ ID NO: 5221 - DNA, 510 bp, Citrobacter freundii
atgacgggtaaggagtcggatctccctgtcgaacgggaaggcgtaacttacgctggtaatgtcactggtagaggacaggtcaaacccggcataacactccattccggccagatcctcttcggtatagtcgagcgcacaggcatcccatgcaccggcccccatccacggcgtggagccctgacaccagatattgaaacgcttggtcagcatttccacccactgcgacggtatgccccgcgctttctggatggtggactccagtttcgccgcgtcaacggacacatgcaggttagggttagccttgatccacatttccggctgctcaacctcgctttcgtcgtccagctcgtagatcaggacaaaaagcgaatcgttgttctcttccccggccagaatctggcagcagtagtcataatgctgtttacaggcggagacaacgttactcccggctgtcgtgatggcgaacaaaatcgcctccggacgtgcacccatacccagttcaagcgctga

SEQ ID NO: 5222 - protein, 169 aa, Citrobacter freundii
MTGKESDLPVEREGVTYAGNVTGRGQVKPGITLHSGQILFGIVERTGIPCTGPHPRRGALTPDIETLGQHFHPLRRYAPRFLDGGLQFRRVNGHMQVRVSLDPHFRLLNLAFVVQLVDQDKKRIVVLFPGQNLAAVVIMLFTGGDNVTPGCRDGEQNRLRTCTHTQFKR

SEQ ID NO: 5223 - DNA, 237 bp, Enterobacter cloacae
atgacccgactgaccaacctgacggccgccgagaaaaaatttctcgacgaggctgttgccgccgctgagagagtgtcaggcaagaagctaaatcagcagaaccggcatatcgtcctgaaccgggcgcgggcgcagatcgaatcgcagcgacatgctgaccgtcagcgggcgttacatgatgaagaacggcagcaggcggattttacatggtcacgtccgcgtgcgccgcgccgctga

SEQ ID NO: 5224 - protein, 78 aa, Enterobacter cloacae
MTRLTNLTAAEKKFLDEAVAAAERVSGKKLNQQNRHIVLNRARAQIESQRHADRQRALHDEERQQADFTWSRPRAPRR

SEQ ID NO: 5225 - DNA, 621 bp, Citrobacter pasteurii
  misc_feature (488)..(497): n is a, c, g, or t
atgcgggtgccaaagttgtcacaattcaaaacccccctccgttaccctggaggtaaggcaaagttctctccacacattgagcaaattcttcgcttcaacaacttagtcggaggctgctacgcggaaccctatgcaggcggagcaggtgtggcattaggtttgctgctcaacggtcttgttgaggacattttcataaatgatatcgaccctgcactttatgctttttggtctgctgttgtaaatcataacgaatcattgtgtgaaatgatttacgaaatccccgtaactattgagaactggcatcaacaaagagacatactgcttaataacgataaatatagtatgctcgaagtcgctttatctactttctttttgaacaggacaaatcgctcaggcattcttaaagctggtgtcattggaggtaaggaacaaaaagcaaagtggaaattagatgcaaggtttaataaacaggatttaatcaaaagaannnnnnnnnntatgttaagggtgccgaactatatcgcaacttttatcagcatgatgatcatgttaaaattgctaaaaccttgcgaaatatcacacttccctggattgtttcttacgataacgttaatgaaataa

SEQ ID NO: 5226 - protein, 206 aa, Citrobacter pasteurii
  misc_feature (163)..(166): Xaa can be any naturally occurring amino acid
MRVPKLSQFKTPLRYPGGKAKFSPHIEQILRFNNLVGGCYAEPYAGGAGVALGLLLNGLVEDIFINDIDPALYAFWSAVVNHNESLCEMIYEIPVTIENWHQQRDILLNNDKYSMLEVALSTFFLNRTNRSGILKAGVIGGKEQKAKWKLDARFNKQDLIKRXXXXMLRVPNYIATFISMMIMLKLLKPCEISHFPGLFLTITLMK

SEQ ID NO: 5227 - DNA, 426 bp, Klebsiella oxytoca
atgaatgtaattgaatctaaaattgctggattagggttcctgcaggcaattattgccagaatggctaataattccttttatattaaagggtgggacctaacattatttgttgcattagttgcattaaaaaaagatgtatcacaatattcgagctatttactacttgcgttaatagtgagtaccatagcgttctgtttattagatgcttattatctacaacaagagaggatttttaggaaaatatataactatttggccgaatcaacttcagaatccattaattatttcagcattaaccctgcgctatataaagataaactaaatggtgaaattctttcatataaaagctcattaacttccacatctattcttctttttcatataccaatgtttgttgctgtttttatcttttttgtattgttttaa

SEQ ID NO: 5228 - protein, 141 aa, Klebsiella oxytoca
MNVIESKIAGLGFLQAIIARMANNSFYIKGWDLTLFVALVALKKDVSQYSSYLLLALIVSTIAFCLLDAYYLQQERIFRKIYNYLAESTSESINYFSINPALYKDKLNGEILSYKSSLTSTSILLFHIPMFVAVFIFFVLF

SEQ ID NO: 5229 - DNA, 516 bp, Enterobacter hormaechei
atgaaaaatggagaaatttgctccctttgcggcaaaggccatctgacaaagaagatggacgaggataggatcacgtacaaaggccagacaaaacaggtgactgatacttacttcacctgtgacttttgccacgtcgagcaagcgggtgctagcgagctaaagtataataagcgggccatgaattgcttcaaaaaagaagtagatgggttgcttactggtaaggaagtttatggcattcgcatcaggcttggactaacccaagatgaagcttcccttgtttttggtggcggcccaaatgccttcactaaatatgaaaacgacgatgtaatccagtctgaatcaatggataagttacttcgtgtagctaactcttatcctgcggtctttgcagacctttgtgaaaaggctggtgtttctactaagattcaaacgacctggttcaaacaagtctctttttcaaacgcctgggttagtgaatttgccgttgaaactaccctcttagaaaagacacactaa

SEQ ID NO: 5230 - protein, 171 aa, Enterobacter hormaechei
MKNGEICSLCGKGHLTKKMDEDRITYKGQTKQVTDTYFTCDFCHVEQAGASELKYNKRAMNCFKKEVDGLLTGKEVYGIRIRLGLTQDEASLVFGGGPNAFTKYENDDVIQSESMDKLLRVANSYPAVFADLCEKAGVSTKIQTTWFKQVSFSNAWVSEFAVETTLLEKTH

SEQ ID NO: 5231 - DNA, 369 bp, Enterobacter hormaechei
atgaattttgtaatttccagcatgtgggtggactctttcagtctgactcgcactacagagagaacaaatgacggtcaagaatttactttgagtatagacacggccgtagattacaacactaaagataaacgcagctttaggctcgctttatctttaaaactaattaaaaatgaaaagtttatattcaacgccagtcaaatggcggttgtgaaatttgacagagatatgagcgaaacagaggcacaagaagaattggaaacaccaatcgttgtcaacactttatatccatatgttagagcattcactattgccacaacacgactggctggatacaacagcataaatttgccagtcgttattgcagaataa

SEQ ID NO: 5232 - protein, 122 aa, Enterobacter hormaechei
MNFVISSMWVDSFSLTRTTERTNDGQEFTLSIDTAVDYNTKDKRSFRLALSLKLIKNEKFIFNASQMAVVKFDRDMSETEAQEELETPIVVNTLYPYVRAFTIATTRLAGYNSINLPVVIAE

SEQ ID NO: 5233 - DNA, 423 bp, Klebsiella oxytoca
atgtttgaagaaaaaatccgaccttttcttgctgtagtaataattcttggcttatgtgtgctgtgtatttatcttgggggtagtatatttcagtcatacttctctttcgaagatagtattattttttcatggttaagtattgcattaattgccttgcctgttgtgatgatttttccacttgtttattttgccctgataattgttaaggggaaaaattttactttcaaaaaaatggataattatgtttcttatttgaagtggagttgcattgctatcataatattagggttgttattttcctgtttgtaccccaaagaattgctcagcaagggatatgtccgttgtaatggtgttccatcaggctggatggcaggaactgcaacccgctacgttaaacatccgtctatctgcgtcattaattga

SEQ ID NO: 5234 - protein, 140 aa, Klebsiella oxytoca
MFEEKIRPFLAVVIILGLCVLCIYLGGSIFQSYFSFEDSIIFSWLSIALIALPVVMIFPLVYFALIIVKGKNFTFKKMDNYVSYLKWSCIAIIILGLLFSCLYPKELLSKGYVRCNGVPSGWMAGTATRYVKHPSICVIN

SEQ ID NO: 5235 - DNA, 129 bp, Enterobacter hormaechei
atggtgaaaactgtggcgcaacgcacaaaattattcaccatgaaaataattatctccgtggggcaaaacgagttcgaggttaaccgattgcacggggtattgcgagcaaaaaagtccgtttttttataa

SEQ ID NO: 5236 - protein, 42 aa, Enterobacter hormaechei
MVKTVAQRTKLFTMKIIISVGQNEFEVNRLHGVLRAKKSVFL

SEQ ID NO: 5237 - DNA, 606 bp, Staphylococcus aureus
atgaatatgccattaatgatagatttaacaaataaaaatgtcgtcatagttggtggaggcgtcgttgcaagtcgtcgggcacaaacattaaatcaatacgttgaacatatgacggtcatcagtccgacaatcactgaaaaacttcaaaatatggtagataacggtgtcgtcatatggaaagaaaaagaatttgaaccaagcgatattgtagacgcgtatctagttattgcagcaaccaatgagccacgtgtcaatgaagcggtaaaaaaagccttacctgagcatgccctttttaataatgttggagatgcatcaaatggcaatgttgtatttccaagtgcactacaccgcgacaagctaactatcagtgtatcaactgatggtgcgagtcctaagttgacaaaatcaattatggcagagcttgaggcgttatatccaccatcatacagttcgtatatcgactttttatatacttgccgacagaaaataaaagtacttgatataacatataacgaaaagcaacagttactgtcacaaattgtgtcacaagaatatttaaatcatgacaaacaagctcaatttttagcgtggttggatgtaagataa

SEQ ID NO: 5238 - protein, 201 aa, Staphylococcus aureus
MNMPLMIDLTNKNVVIVGGGVVASRRAQTLNQYVEHMTVISPTITEKLQNMVDNGVVIWKEKEFEPSDIVDAYLVIAATNEPRVNEAVKKALPEHALFNNVGDASNGNVVFPSALHRDKLTISVSTDGASPKLTKSIMAELEALYPPSYSSYIDFLYTCRQKIKVLDITYNEKQQLLSQIVSQEYLNHDKQAQFLAWLDVR

SEQ ID NO: 5239 - DNA, 687 bp, Staphylococcus aureus
atgactaatcaatttaaaaataaacagtccaaattacatgacagtttagaatccatcacaaaaaacttatatgcgacacctacttcggaactgccttttgataatcgatttctatttaaatcttttattttaaaacgtgaaacaggtaatattgttatctatcattccggacacttaggtgactcccaacaagacattgcatcattaggtggtgtttcaaaagtattgatgaatcatgatcatgaatctataggaggttctaatcaagttgaagccccttactttatacatgaaaatgatgtggctgcactgaaacataagatttctgttcaaaaacaatttagtaatcgtgtaatgttggataaggatttagaagttattcccgcgcctggacatacaccagggacgacactatttttatgggatgatggtcatcaccgttacttatttactggagattttatatgttttgaagggaagagatggcgtacagttatattaggttcaagtgatagagaaaaatctattcaaagtttagagatggttaaagaattagattttgatgtacttgtaccttgggttactatcaaagatgaaccgttagtttattttgtagaaaatgaatatgaaaaacgtgaacaaatacaaaatattattgatagagtacgtgagggcgagaatagctaa

SEQ ID NO: 5240 - protein, 228 aa, Staphylococcus aureus
MTNQFKNKQSKLHDSLESITKNLYATPTSELPFDNRFLFKSFILKRETGNIVIYHSGHLGDSQQDIASLGGVSKVLMNHDHESIGGSNQVEAPYFIHENDVAALKHKISVQKQFSNRVMLDKDLEVIPAPGHTPGTTLFLWDDGHHRYLFTGDFICFEGKRWRTVILGSSDREKSIQSLEMVKELDFDVLVPWVTIKDEPLVYFVENEYEKREQIQNIIDRVREGENS

SEQ ID NO: 5241 - DNA, 1620 bp, Staphylococcus aureus
atgtatgaaaggaagttagttatgcaaaagtcagctctattcgcgcctgaaaaatataacattatttcggaaatcgaaaaatatagccacataccagataaaaaggcaattttatatcataatactgaaggcgaagatatatcagtcacttaccaacagctcattgaacagtctaataaagtaggtaatgttttagcatcgcacggtttatctaaaggcgataaagtactcattatgatgccacgatctattgcgacgtatgaattatatattgctgctttaaaattaggtgttgcaatcattccatgttctgaaatgctaagaactaaagatttacaataccgtatcacacatggtgaaattaatgcagttattgcactagagccattcacagttgaatttgaaaaaattaaagaatatgatgcgttaactaaatttgttattgccggtcaaaaagatggatggatttcacttgaagctgaaaaagaaaacgcaagtaacaaactagaaatggcagatacgacgcgtgatgatatggcgattctgtcatatacatctggtacaactggcaatcctaaagccgttacacattgtcatggatggggatttgcacatttacaaatggcaccaaaacattggttatgtattaatgaagatgacttagtttgggcaacagcagcaccaggttggcaaaaatgggtatggagtcctttcttatctgtattaggttcaggtgcaactgcttttgtatttaatggaaggttcagtcctgaaacatacttagaattgcttcaaaaatatcaaattaatgttttatgttgtacaccgacagaatatcgtatgatggctaaattacagaacttaaatgattatgacttaacgcatttacatagtgccgtttctgcaggtgagccactaaatcgagaagtagttgaacaattcaagaaatactttaatttaactgtaagagatggatatggccagactgaaagtaccttgcttataggctttttaaaagatacaccacagaggattggatcaatgggtaaaggcattccgggtagttcggtcactgtagtagatgatgaggggaatagcgtacctgctaatacgaaagggaatattgcagtaccacttgatttgccagcacttttcaaagggtattataaagagccagaacgtacggcgaaagcgcaaacaggtaaatactacatcactggtgacttagctcatgtagatgatgatggttatttctggtttgaaggacgtcgagatgacattattattagttcaggctatacgattgggccttttgaagttgaagatgcgttaacgaatcatccagccgttaaagaatgtgctgtagtagcaaaacctcatgatatacgaggaaatattgttaaagcattcgttattttacaggaccatactgcgggtgatgatacgttagttaaagaactacaacaatttgttaaaaatgaagttgcaccatataaatatccgagagagattgaattcgttgacgacttaccaaaaacaaactcaggtaaaattcgtcgtgttgaactacgagatgctgaaatagaaaaatggcaacaacaaaaagatagcaatcaataa

SEQ ID NO: 5242 - protein, 539 aa, Staphylococcus aureus
MYERKLVMQKSALFAPEKYNIISEIEKYSHIPDKKAILYHNTEGEDISVTYQQLIEQSNKVGNVLASHGLSKGDKVLIMMPRSIATYELYIAALKLGVAIIPCSEMLRTKDLQYRITHGEINAVIALEPFTVEFEKIKEYDALTKFVIAGQKDGWISLEAEKENASNKLEMADTTRDDMAILSYTSGTTGNPKAVTHCHGWGFAHLQMAPKHWLCINEDDLVWATAAPGWQKWVWSPFLSVLGSGATAFVFNGRFSPETYLELLQKYQINVLCCTPTEYRMMAKLQNLNDYDLTHLHSAVSAGEPLNREVVEQFKKYFNLTVRDGYGQTESTLLIGFLKDTPQRIGSMGKGIPGSSVTVVDDEGNSVPANTKGNIAVPLDLPALFKGYYKEPERTAKAQTGKYYITGDLAHVDDDGYFWFEGRRDDIIISSGYTIGPFEVEDALTNHPAVKECAVVAKPHDIRGNIVKAFVILQDHTAGDDTLVKELQQFVKNEVAPYKYPREIEFVDDLPKTNSGKIRRVELRDAEIEKWQQQKDSNQ

SEQ ID NO: 5243 - DNA, 588 bp, Staphylococcus aureus
atgactatagatcgacgtattagaaaatcacaagttgcaatgagaaatgcatttattgaacttttacatcaacaccaattagaagagattactgtgcaacaaattgcagatttagctgatgttaaccgtagtacattttatacgcattattatgataagtatgatttgcttgaaaaattagaggaccagcagttggaggaaataagagacttcattcatgatgagaagttaaatggagcagttaagttatccacggataacatacatcaaattatgaccgttttaatagaaatgatagaaaaagacatcgcattttatcaattgatgtttcgtatgggtaaagattcaaatatccacgaaaaactttatgatttaattatgtgtcatttacaacgttataaaaatgaaaatgatcaaattaatggtataccattttcttatttcatgagttatgtttcaggtgcgggattgtcttttataagacattgggtagaagatccaaaccgtatagacaaagttgacttaataaggcattttaatacgattgtcaatcaagggccagcaacgataattaaaaatatacaataa

SEQ ID NO: 5244 - protein, 195 aa, Staphylococcus aureus
MTIDRRIRKSQVAMRNAFIELLHQHQLEEITVQQIADLADVNRSTFYTHYYDKYDLLEKLEDQQLEEIRDFIHDEKLNGAVKLSTDNIHQIMTVLIEMIEKDIAFYQLMFRMGKDSNIHEKLYDLIMCHLQRYKNENDQINGIPFSYFMSYVSGAGLSFIRHWVEDPNRIDKVDLIRHFNTIVNQGPATIIKNIQ

SEQ ID NO: 5245 - DNA, 321 bp, Staphylococcus aureus
gtgagcgagacagatgaacctcaggggtttgaacgcacgcataatatattaaatattaatcagagtagtctgggtgtagtgacatacattacaaataaattaaagtcgacgttgaagcaacacataataattgctcgtggtaaaaagcgaatcgactatcgactgtcgtataacttttacactacgtattatgataatgtagaaatcaagaaaatcgactgtgaatatacctatgctatgcccattgcaattttaataagacacacgatgtcattcgacaatgctcatttctttgctcagttacgtcatcctgtcttataa

SEQ ID NO: 5246 - protein, 106 aa, Staphylococcus aureus
MSETDEPQGFERTHNILNINQSSLGVVTYITNKLKSTLKQHIIIARGKKRIDYRLSYNFYTTYYDNVEIKKIDCEYTYAMPIAILIRHTMSFDNAHFFAQLRHPVL

SEQ ID NO: 5247 - DNA, 192 bp, Staphylococcus aureus
atgagaatattaattacaggcacagttgctatcttaatcattctaggtttggtcaaaacgatacaagattacgaaatgacaaacgacacgagtcgtcagttgtcagacaacaaagatgatgataaagtcatccatcttaataattttaaaaatttacatgcgaaagaatttaacccatctgatttcttttaa

SEQ ID NO: 5248 - protein, 63 aa, Staphylococcus aureus
MRILITGTVAILIILGLVKTIQDYEMTNDTSRQLSDNKDDDKVIHLNNFKNLHAKEFNPSDFF

SEQ ID NO: 5249 - DNA, 549 bp, Staphylococcus aureus
atgaaagagactgatttacgagttataaagacaaaaaaagcattgtcgagtagcttgctacaattgttagaacagcaattattccaaacgattactgtcaatcaaatttgcgacaacgcactcgtacaccgtacaacattttataaacatttttatgataaatatgatcttctagagtacttgttcaatcaattgactaaagactactttgctagagatatcagtgaccgtcttaatcatccattccaaacgatgagtgatacgattaataataaagaggatttgagagaaatcgcagaattccaagaagaagacgctgaatttaataaagtattaaaaaatgtctgcattaaaattatgcataacgatatcaaaaataatagagaccgtatcgatattgacagcgacatcccagataatctcatattttatatttatgactcgttgattgaaggttttatacattggataaaagatgaaaaaattgattggcctggcgaagatattgataacattttccatagattaatcaatattaagattaaatag

SEQ ID NO: 5250 - protein, 182 aa, Staphylococcus aureus
MKETDLRVIKTKKALSSSLLQLLEQQLFQTITVNQICDNALVHRTTFYKHFYDKYDLLEYLFNQLTKDYFARDISDRLNHPFQTMSDTINNKEDLREIAEFQEEDAEFNKVLKNVCIKIMHNDIKNNRDRIDIDSDIPDNLIFYIYDSLIEGFIHWIKDEKIDWPGEDIDNIFHRLINIKIK

SEQ ID NO: 5251 - DNA, 2106 bp, Staphylococcus aureus
atgaataacggttttttcaatagcgactttgattcaatttttcgaagaatgatgaaagatatgcaaggttcaaatcaagtcggaaacaaaaagtactatattaatggtaaagaagtttcacctgaagaactagcgcaactcacacaacaaggtggcaatcactctgctgaacaaagtgcgcaagcttttcaacaagcagcacaaagacaacaagggcaacaaggtggcaacggcaattatttagaacaaattggtcgtaaccttacgcaagaagcacgtgacggtttattagatccagtcattggtcgtgataaagaaattcaagaaactgctgaagttttaagtagacgaactaaaaacaatcctatattagttggagaagctggtgttggtaaaactgcgattgttgaaggtttagcacaggcaatcgttgaaggaaatgtaccagcagcaatcaaagacaaagaaattatttctgtagacatttcatcattagaagctggaacgcaatatcgtggtgcttttgaagaaaatattcaaaaattaatcgaaggtgttaaatcttcacaaaatgccgtactattctttgatgaaatccatcaaattatcggttcaggtgccacaggaagtgattcaggtagcaaagggttatctgatattttgaaacctgcattaagtcgtggtgagatttctattattggtgcaacaacacaagatgaatatcgaaacaatattcttaaagatgctgcattaacgcgcagatttaatgaagtgcttgttaatgaaccaagcgctaaagatactgttgaaattttaaaaggtattcgcgaaaaattcgaagaacaccatcaagtaaaattaccagatgacgtattaaaagcatgtgttgacttatcaattcaatatattccacaacgattattaccagataaagcaatcgatgtgttagatattacagcagcacatttatctgcgcaaagtccagctgtcgataaagttgaaactgaaaaacgaatttctgaattagaaaatgataaacgtaaagcagtaagtgctgaagaatataaaaaagctgacgacattcaaaatgaaatcaaatcattacaagataaattagaaaatagtaatggtgaacatactgctgttgctacagttcatgatatttcagatactattcaacgattaactggtattccagtttctcaaatggatgataacgatattgaacgtttaaaaaatatttctaatcgtttaagaagtaaaatcataggtcaagatcaagctgtagaaatggtttcacgtgcaattcgccgtaatcgtgctgggtttgatgacggcaaccgtccaattggcagtttcctatttgttggccctactggtgttggtaaaacagagcttgctaaacaattagcaattgatttatttggtaataaagatgcactgattcgacttgatatgagtgaatatagtgacacaacagctgtttcaaaaatgattggtacaactgctggttatgttggttatgatgacaattcaaatacgttaactgaaaaagtacgccgtaatccatactcagtcattctatttgatgaaatcgaaaaagcaaatccacaaattttaacattgttattacaagtaatggatgatggtaatttgactgatggtcaaggtaatgtcatcaactttaaaaatacaattattatttgtacatcaaatgctggctttggcaatggcaatgacgctgaagaaaaagatattatgcacgaaatgaaaaaattcttccgccctgaattccttaaccgcttcaacggcatcgttgaattcttacatttagataaagatgcattgcaagatatcgtcaacttattattagacgatgtacaagttacattagacaaaaaaggtattacgatggacgtttctcaagatgcgaaagattggttaattgaagaaggctatgatgaagaattaggtgcacgtccattaagacgtattgttgaacagcaagtacgtgacaaaattacagattactatttagatcatacagacgttaaacatgtggatatagatgttgaggataacgaattagtcgtaaaaggtaaataa

SEQ ID NO: 5252 - protein, 701 aa, Staphylococcus aureus
MNNGFFNSDFDSIFRRMMKDMQGSNQVGNKKYYINGKEVSPEELAQLTQQGGNHSAEQSAQAFQQAAQRQQGQQGGNGNYLEQIGRNLTQEARDGLLDPVIGRDKEIQETAEVLSRRTKNNPILVGEAGVGKTAIVEGLAQAIVEGNVPAAIKDKEIISVDISSLEAGTQYRGAFEENIQKLIEGVKSSQNAVLFFDEIHQIIGSGATGSDSGSKGLSDILKPALSRGEISIIGATTQDEYRNNILKDAALTRRFNEVLVNEPSAKDTVEILKGIREKFEEHHQVKLPDDVLKACVDLSIQYIPQRLLPDKAIDVLDITAAHLSAQSPAVDKVETEKRISELENDKRKAVSAEEYKKADDIQNEIKSLQDKLENSNGEHTAVATVHDISDTIQRLTGIPVSQMDDNDIERLKNISNRLRSKIIGQDQAVEMVSRAIRRNRAGFDDGNRPIGSFLFVGPTGVGKTELAKQLAIDLFGNKDALIRLDMSEYSDTTAVSKMIGTTAGYVGYDDNSNTLTEKVRRNPYSVILFDEIEKANPQILTLLLQVMDDGNLTDGQGNVINFKNTIIICTSNAGFGNGNDAEEKDIMHEMKKFFRPEFLNRFNGIVEFLHLDKDALQDIVNLLLDDVQVTLDKKGITMDVSQDAKDWLIEEGYDEELGARPLRRIVEQQVRDKITDYYLDHTDVKHVDIDVEDNELVVKGK

SEQ ID NO: 5253 - DNA, 432 bp, Staphylococcus aureus
atggaatataaaaagatactaattcgtttattaattgcttttgcagtacttttctcagcagatttcacttatcaatccgtcgaacaaacgcatcaatcgcatgccgcagttaattattatagtaaaaaccaatgtacatggtgggcatttaaacgtcgcgcacaagtcggtaaacctgtttctaatagatggggcaatgctaaaaattggtattacaatgcacgtaaatcaaaatatgcgactggtcgtacaccaagaaaatttgctgtcatgcaatcaactgcaggatattatggacatgtcgcagttgttgaacaagtatataaaaacggtagtattaaagtttcagaatacaacttttatcgcccattaaaatacaatacacgtgtactaagcaaaaaggcagcacgtaactttaactatatttactaa

SEQ ID NO: 5254 - protein, 143 aa, Staphylococcus aureus
MEYKKILIRLLIAFAVLFSADFTYQSVEQTHQSHAAVNYYSKNQCTWWAFKRRAQVGKPVSNRWGNAKNWYYNARKSKYATGRTPRKFAVMQSTAGYYGHVAVVEQVYKNGSIKVSEYNFYRPLKYNTRVLSKKAARNFNYIY

SEQ ID NO: 5255 - DNA, 1080 bp, Staphylococcus aureus
atgcgtatcttaaaagagtccattattgtggcatttgcctttgttggtgttgtcgttggtgccggctttgctactggtcaagaaattttccagtttttcacaagtcatggcgcatatagcatttcaggcattattgtaacaggactattgattactttaggtggaatggttgtcatgcatacaggtcatcatctaaagtccagaaatcattctgattcaattaactatttcttatacccctctattgcaagaggttttgatattattttaacaatgtttatgttgtctttagctattattatgactgcaggtggtgcgtcaaccattcatcaaagtttcaacttaccgtattggctgagcgcactcatattagtcgcctttattttagcaacactgtttctaaaattcgatcgtttaattgctgtgcttggcggtgttaccccatttttaattgcgattgtcattatgattgcggtctactatttcacaacaagtcatcttgattttactgccgctaataatgatgctcagattcataagcagaaatcattatcacctggatggtggtttgatgcgattaactatgcaagcttgcaaattgctgctgccttcagcttcttatcagtgatgggtagtaaagttaaatatcgtgactcaacgttatacgggggcttgattggcggtttaatcattacatttttactcatgatgattaatctaggtttaatttctcaattcgataaaattaaacacgtagatctacctacattaaaattagcgacacaaatgtctccgtcaattggtattattatgtctgtcattatgatacttgtcatctacaatactgttgttggattaatgtatgcatttgcgtcacgtttcagcgttccattcagcagacgttacttcatcattattattacaatggctgtcatcacttatattagtacatttatcggtttcatttcattaattggaaaagtattccctattatgggattgttcggtttcatcttactcatacctgtactctataaaggtttaattaagcgtattaccggcaaatctcatatcgattaa

SEQ ID NO: 5256 - protein, 359 aa, Staphylococcus aureus
MRILKESIIVAFAFVGVVVGAGFATGQEIFQFFTSHGAYSISGIIVTGLLITLGGMVVMHTGHHLKSRNHSDSINYFLYPSIARGFDIILTMFMLSLAIIMTAGGASTIHQSFNLPYWLSALILVAFILATLFLKFDRLIAVLGGVTPFLIAIVIMIAVYYFTTSHLDFTAANNDAQIHKQKSLSPGWWFDAINYASLQIAAAFSFLSVMGSKVKYRDSTLYGGLIGGLIITFLLMMINLGLISQFDKIKHVDLPTLKLATQMSPSIGIIMSVIMILVIYNTVVGLMYAFASRFSVPFSRRYFIIIITMAVITYISTFIGFISLIGKVFPIMGLFGFILLIPVLYKGLIKRITGKSHID

SEQ ID NO: 5257 - DNA, 1278 bp, Staphylococcus aureus
atgaaggaaaaacgaactaacgtaaggtggatgttcgcgcttgcgttcttctttattggggttattgcgtatatggatagagcaaacatttcatatatcgctaagcaaatgatggatgatttagggatgacaaaaccacaatttggtttattggcatcattcttctctctaggttatgcattaatgcaagtaccatcggggatgttggctgaaaaattcggtccacgtaagatgattacaattgcattagtttggtggagtgcatttacaatcttaacgggtatgattaagaaccacggtttaatttatttagtgagattcttatttggtgtaggtgaggcgccaatgtacccttctaatgctgtgtttaattcattttggttctctaaaaatgaaaaaggtagagcatcaagtgcattattagcaggatcatatttcggacctgtattagcaccaatagttacaattgctattgttaacgcatttaactggcaagcagtattttacatttttggtgcagtaggtattttaatggctgtattatgggcgattattgccaaagacttacctgagcaacatagaatggttaatgaagcggagaaacgtttcattatggaaaatcgtgatatcgtagctactgaaaagtcatcaccaccatggaatgatttctttaaacgttttagcttctatgcaattgcaattcaatactttgttgtacaatttatcattacattattcttaatttggttaccgacgtatttaacagaagtattccacgttaactttaaagaaatgagcattagttcattaccttggttattaatgttcttcttaatcttatcagcaggtgcaatttctgaccgtgtattaggattaggtcgttcaaaattcgtagctagaggtgtaattgcaattgcaggatttattgtgtttgcagtttcaattatctttgctgtacgcacaggaaatttatatgtaagtattttctggttatcactaggtcttggtggtatcggtatttcaatgggtatgagttgggctgcagcaactgacttaggacgtaacttctctggtacagtatcagggtggatgaacttatggggtaatataggtgcattaatcagtccgctattagcaggtctattcgtagaacatttgggttggacaatgacattccaattgttaatcgttccagcagtaatcgctgtgattatgtggttctatgtgaaaccagatcaacctttaattgttagtgatgataaagcaatagaaaaataa

SEQ ID NO: 5258 - protein, 425 aa, Staphylococcus aureus
MKEKRTNVRWMFALAFFFIGVIAYMDRANISYIAKQMMDDLGMTKPQFGLLASFFSLGYALMQVPSGMLAEKFGPRKMITIALVWWSAFTILTGMIKNHGLIYLVRFLFGVGEAPMYPSNAVFNSFWFSKNEKGRASSALLAGSYFGPVLAPIVTIAIVNAFNWQAVFYIFGAVGILMAVLWAIIAKDLPEQHRMVNEAEKRFIMENRDIVATEKSSPPWNDFFKRFSFYAIAIQYFVVQFIITLFLIWLPTYLTEVFHVNFKEMSISSLPWLLMFFLILSAGAISDRVLGLGRSKFVARGVIAIAGFIVFAVSIIFAVRTGNLYVSIFWLSLGLGGIGISMGMSWAAATDLGRNFSGTVSGWMNLWGNIGALISPLLAGLFVEHLGWTMTFQLLIVPAVIAVIMWFYVKPDQPLIVSDDKAIEK

SEQ ID NO: 5259 - DNA, 1359 bp, Staphylococcus aureus
atgtttaacgaaatatggccgttaatcagtgttgttttaggtatcgttattttattagtattaattattgggtttaaattaaatacatttatttcattaattatcacatcgatgattacagcgttaatgctaggtataccattgactaaaattatggagacgattgagaaaggaatgggcagtacgctcggccacattgcactgatattcggtttaggtgccatacttgggaaattgcttgctgatggtggtggtgcaactcgaatcgcagacacgttgattcaaaaatttggtcaaaaacatgtacaatgggcaatgcttgttgcagcatttatcgtcggtattgcattgttctttgaagtaggtttagtcttactgattccattagtatttacagtagcaaaacgcgcaaatgtttcagtgttaaaactaggactacctatggtaacagctttatcagtgacacatggctttttaccaccacatccaggaccggtagtcatcgcaaaagaattaaaggcaaatgttggagatgtattactgtatggtatgattattgccattccagttacactcattgcagggcctatatttaacaaagttgcacaaaaaatgattccgtctgcgtatacacgagaaggcgatatttcagcgttaggtgcacaaaaagaatttacggatcaagagatgccaggatttggtatgagtttattaacagcaacattaccagtcatattaatgttagtgtctacgataacgcaacttgtaactgggcatgacaaacctacaaatctatttgaatctatcatttatatgataggaacagcagggacagccatgctaatagcagtattatttgcaatcgttacgatgggattaatgagaaagcgtaagatgaatcatattatggaatcagtgacgaatgcgatttatccaatcggaatgatgttattgattattggcggtggcggtacatttaaacaagtattaattgacggcggtgtcggaaatacaattgctaaaatgtttgaaggtacagagatgtctccgattttactagcatggattgttgcagctgtgctacgtatcgcattaggttcggctacagtagctgcgatttcaactacaggtattgtcttaccattattacaatcatcagatgtaaatgttgcattagttgtacttgcgataggtgcaggtagtgtgattttgtctcatgtaaatgacgcaggattttggatgtttaaagaatattttggtttaactgtaaaagaaacattcttaacatggtcattattagaaacgattatttccgtttcaggtatcatcttcattttattcattagcttatttgtttaa

SEQ ID NO: 5260 - protein, 452 aa, Staphylococcus aureus
MFNEIWPLISVVLGIVILLVLIIGFKLNTFISLIITSMITALMLGIPLTKIMETIEKGMGSTLGHIALIFGLGAILGKLLADGGGATRIADTLIQKFGQKHVQWAMLVAAFIVGIALFFEVGLVLLIPLVFTVAKRANVSVLKLGLPMVTALSVTHGFLPPHPGPVVIAKELKANVGDVLLYGMIIAIPVTLIAGPIFNKVAQKMIPSAYTREGDISALGAQKEFTDQEMPGFGMSLLTATLPVILMLVSTITQLVTGHDKPTNLFESIIYMIGTAGTAMLIAVLFAIVTMGLMRKRKMNHIMESVTNAIYPIGMMLLIIGGGGTFKQVLIDGGVGNTIAKMFEGTEMSPILLAWIVAAVLRIALGSATVAAISTTGIVLPLLQSSDVNVALVVLAIGAGSVILSHVNDAGFWMFKEYFGLTVKETFLTWSLLETIISVSGIIFILFISLFV

SEQ ID NO: 5261 - DNA, 393 bp, Staphylococcus aureus
atgaaaaaagtaatcaatgtagtaggagctattattttttctgataacaaaattctttgtgcacagagaagtgaaaaaatgagtctgcctttaatgtgggaatttcctggcggtaaggttgaaaagaatgaaactgaaaaagacgctttgattagagaaattagagaagaaatgaaatgtgatttaattgttggagacaaagttataactacagaacatgaatatgattttggaattgttaggttaacaacatacaaatgtactttaaacaaagagttaccaactctaactgaacataagagtattgaatggttgtcaataaacgaacttgataaattaaattgggccccagcggatataccagccgttaataaaattatgactgagggataa

SEQ ID NO: 5262 - protein, 130 aa, Staphylococcus aureus
MKKVINVVGAIIFSDNKILCAQRSEKMSLPLMWEFPGGKVEKNETEKDALIREIREEMKCDLIVGDKVITTEHEYDFGIVRLTTYKCTLNKELPTLTEHKSIEWLSINELDKLNWAPADIPAVNKIMTEG

SEQ ID NO: 5263 - DNA, 2862 bp, Staphylococcus aureus
atgagtagattactaaatgatttcaatcaatctttacataaagggtttatagacaaacatatttctcataaagggaattatacaccgaagcttttagtaaataataaaaatgaaaaagttctttcaacaattatagatgaacttcaaaaatgtgaaacgttttatttttctgtggcttttataacagaaagcggtttagccagcttaaaggctcaactattagatttaagcaataagggtgttaaagggaaaatattaacatctaattacttagggtttaatagtcctaaaatgtatggagaattacttaaattaaaaaatgtagaggtaagattaactgatattgctggattccatgccaaaggatatatttttgagcataaggattatagttctatggtaataggaagctctaatttaacatctaatgcgttaaaggttaattatgagcataatgttttactgtctactatgaaaaatggcgatttagttgatagtgtaaaaagtgaatttgacttgttatggcaaaagagtaccccactgactgagcaatggattaattcatataaagaatcatttgagtaccgttccttagaaaaattagcggaggttgaacaaactcaaatgctgctagctgataaggtgaaaaaatcagtggaaattgtacccaatttaatgcaagcagaagcattaaggtcattaaaagctattagggataaagccaaagataaggcgttaataatatctgcaactggtacaggtaaaacgattttatgtgcattagatgttagagaagtaaaccctaataaatttttatttattgttcataatgaggggattttaaatagagctaaggaagaatttaaaaaagtattacctataaaaaatgatagtgattttggattgttgacaggaaaacatagagatgtcgatgccaaatatttatttgcaaccattcaaacattatctagagatgataattttaagcaatttgatgaaaatgaatttgattatattgtttttgatgaagcacatcgttctgctgcatctacttatcaacgagtatttaactacttcaaacctaagttcatgctgggaatgactgctacaccagaaagatcagatgaattaagtatatttgaactgtttgattataatattgcatatgaaataaggttacaagcagcattagaaagtgatattttatgtccatttcattattttggtgtgactgattatgtacatcaaggtattaaagaagatgatgtaactaaactgagatatttaacttctgatgaaagagttaattatattattcaaaagacagattactatggatattcaggtgaaattttacaaggattgatttttgtaagtagcaaaaaagaagcttatgatttagcggataaactaagttcaaaagggattaaaagtgttgctttaacaggagatgatagtgttaattatcgccaaattgtaatagaaaaattaaaagaaggtaagattaactatattataactgtagatctttttaacgaaggtattgatattccagaagtcaatcaagttgtaatgttgagaccaacagagtctagtattatattcattcagcaacttggtagaggattaagaaaaagttcaaataaagagtatgttacagtaattgattttattggtaattataagacaaattatttaattccgattgcgctttctggggatcaatcgcaaaataaagataattataagaagtttttaacgaataacgattcgattaatggagtatctacaattaattttgaagaagttgctaaaaaacagatttacaattcattggatgcagtatcattaaatcaaaataaattaatattaaaagcttatgaagaagttgaaaatagattgggacacatgccgttactaatggatttcatacaacaacattctatagatccaagcgttatattttctaaatttagtaattattacgagttcttagtgagatataaaaaaatagatacattattgacggaaaatgaatctaaaaatctggttttcttttcaaggcaaatagcacctggattgaaaagaatcgatagtttagttttagaagaacttttaaaaaatgaattaacatatgatgaattaaaaaataaaatgttgaacgaagttaaggatataacagaagatgatatagatacttcattaagaattttagatttttcattttacaacgcaggaattgaaaaaatctatggaagtcccattatagaacgtaatgaaagaatgataagactaagcgatgcatttactaatgctctaagtaatcaaacatttaatatgtttttagaagatcttattgaattatcaaagtataacaatgaaaaataccaaaaaggtaaaaatggactgattttatataataaatattcaagagaagattttagtaaaatatttaattggaataaaaatggttcgtctgtaatcatgggatacatgataaaaagccaagaaatgccaatatttatcacttatgataagcatgaggatataagtgatagcacaaaatatgaagatgaatttttaagtcaagatgaattaaaatggtttactaaatctaatagaacgctagaatcaaaagaagttcagaaaattttgtcccatagagcaaaaggaattaaaatgtatatttttgtacagaaaaaagatgatgatggtatatatttttattatttaggaactgctggatatatagaaggttcagaaaagcaagataaaatgccgaatggttcaaacgtagtaacgatggatttagcactggataaagctgtaagagatgatatatatcgttatctaacaaattaa

SEQ ID NO: 5264 - protein, 953 aa, Staphylococcus aureus
MSRLLNDFNQSLHKGFIDKHISHKGNYTPKLLVNNKNEKVLSTIIDELQKCETFYFSVAFITESGLASLKAQLLDLSNKGVKGKILTSNYLGFNSPKMYGELLKLKNVEVRLTDIAGFHAKGYIFEHKDYSSMVIGSSNLTSNALKVNYEHNVLLSTMKNGDLVDSVKSEFDLLWQKSTPLTEQWINSYKESFEYRSLEKLAEVEQTQMLLADKVKKSVEIVPNLMQAEALRSLKAIRDKAKDKALIISATGTGKTILCALDVREVNPNKFLFIVHNEGILNRAKEEFKKVLPIKNDSDFGLLTGKHRDVDAKYLFATIQTLSRDDNFKQFDENEFDYIVFDEAHRSAASTYQRVFNYFKPKFMLGMTATPERSDELSIFELFDYNIAYEIRLQAALESDILCPFHYFGVTDYVHQGIKEDDVTKLRYLTSDERVNYIIQKTDYYGYSGEILQGLIFVSSKKEAYDLADKLSSKGIKSVALTGDDSVNYRQIVIEKLKEGKINYIITVDLFNEGIDIPEVNQVVMLRPTESSIIFIQQLGRGLRKSSNKEYVTVIDFIGNYKTNYLIPIALSGDQSQNKDNYKKFLTNNDSINGVSTINFEEVAKKQIYNSLDAVSLNQNKLILKAYEEVENRLGHMPLLMDFIQQHSIDPSVIFSKFSNYYEFLVRYKKIDTLLTENESKNLVFFSRQIAPGLKRIDSLVLEELLKNELTYDELKNKMLNEVKDITEDDIDTSLRILDFSFYNAGIEKIYGSPIIERNERMIRLSDAFTNALSNQTFNMFLEDLIELSKYNNEKYQKGKNGLILYNKYSREDFSKIFNWNKNGSSVIMGYMIKSQEMPIFITYDKHEDISDSTKYEDEFLSQDELKWFTKSNRTLESKEVQKILSHRAKGIKMYIFVQKKDDDGIYFYYLGTAGYIEGSEKQDKMPNGSNVVTMDLALDKAVRDDIYRYLTN

SEQ ID NO: 5265 - DNA, 423 bp, Staphylococcus aureus
atgaacaaaaaacatgtttttataattattggtgtcattttatgtatatgtatagttgcatcagtcatttatttaaaagtgaaatatgacgaaaaagaaaaacaaaaagcaatatactataaagaacaacaggagcgtattacactctatcttaagcataatactaaagaacccaataccatcaaaactgtacatttcacaagtttaaaaagaggacctatgggcgatgcagtaattgaaggttacataaatgaaaataaagaagatgattttgttgcatatgggtctccagaacataattatcaatttggtggaagtttaatcaaaagtaaaaatttaagcacgttattaaaaccagtacatcaaaccaaatcacctgatgagataaaaaaggaattagagtctaaaaagaacgaccgctaa

SEQ ID NO: 5266 - protein, 140 aa, Staphylococcus aureus
MNKKHVFIIIGVILCICIVASVIYLKVKYDEKEKQKAIYYKEQQERITLYLKHNTKEPNTIKTVHFTSLKRGPMGDAVIEGYINENKEDDFVAYGSPEHNYQFGGSLIKSKNLSTLLKPVHQTKSPDEIKKELESKKNDR

SEQ ID NO: 5267 - DNA, 819 bp, Staphylococcus aureus
atgaataactttaataatgaaatcaaattgatattacaacaatatttagaaaagtttgaagcgcattacgagcgtgtattacaagacgatcaatatatcgaagcattagaaacattgatggatgactatagtgaatttattttaaatcctatttatgaacaacaatttaatgcttggcgtgacgttgaagaaaaagcacaattaataaaatcactgcaatatattacagcgcagtgtgttaaacaagtggaagtcattagagcgagacgtctattagacggacaggcgtctaccacaggttactttgacaatatagaacattgtattgatgaagagtttggacaatgtagtatagctagcaatgacaaattattgttagttggttcaggtgcatatccaatgacgttaattcaagtagcaaaagaaacaggtgcttcagttatcggtattgatattgatccacaagccgttgacctagggcgcagaatcgttaacgtcttagcaccaaatgaagatataacaattacggatcaaaaggtatctgaacttaaagatatcaaagatgtgacgcatatcatattcagctcgacaattcctttaaagtacagcattttagaagaattatatgatttaacaaatgaaaatgtcgtagttgcaatgcgctttggtgatggcatcaaagcaatatttaattatccgtcacaagaaacagcggaagataagtggcaatgtgtgaataaacatatgagaccacagcaaatttttgatatagcactttataaaaaagcagctataaaggtaggtattacggatgtctaa

SEQ ID NO: 5268 - protein, 272 aa, Staphylococcus aureus
MNNFNNEIKLILQQYLEKFEAHYERVLQDDQYIEALETLMDDYSEFILNPIYEQQFNAWRDVEEKAQLIKSLQYITAQCVKQVEVIRARRLLDGQASTTGYFDNIEHCIDEEFGQCSIASNDKLLLVGSGAYPMTLIQVAKETGASVIGIDIDPQAVDLGRRIVNVLAPNEDITITDQKVSELKDIKDVTHIIFSSTIPLKYSILEELYDLTNENVVVAMRFGDGIKAIFNYPSQETAEDKWQCVNKHMRPQQIFDIALYKKAAIKVGITDV

SEQ ID NO: 5269 - DNA, 1599 bp, Staphylococcus aureus
atgagaaaactaactaaaatgagtgcaatgttacttgcatcagggctaattttaactggttgtggcggtaataaaggtttagaggagaaaaaagaaaacaagcaattaacgtatacgacggttaaagatatcggtgatatgaatccgcatgtttacggtggatcaatgtctgctgaaagtatgatatacgagccgcttgtacgtaacacgaaagatggtattaagcctttactagctaaaaagtgggatgtgtctgaagatgggaagacatacacgttccatttgagagatgacgttaaattccatgatggtacgccatttgatgctgacgcagttaagaaaaatattgacgcagttcaagaaaacaaaaaattgcattcttggttaaagatttcgacattaattgacaatgttaaagttaaagataagtacacggttgaattgaatttgaaagaagcatatcaacctgcattggctgaattagcgatgcctcgtccatatgtatttgtgtctccaaaagactttaaaaacggtacaacaaaagatggcgttaaaaagttcgatggtactggtccatttaaattaggtgaacacaaaaaagatgagtctgcagactttaacaaaaatgatcaatactggggcgaaaagtctaaacttaacaaagtacaagcaaaagtaatgcctgctggtgaaacagcattcctatcaatgaaaaaaggtgaaacgaactttgccttcacagatgatagaggtacagatagcttagacaaagactctttaaaacaattgaaagatacaggtgactatcaagttaagcgtagtcaacctatgaatacgaaaatgttagttgtcaattctggtaaaaaagataacgctgtgagtgacaaaacagtcagacaagcgattggtcatatggtaaacagagataaaattgccaaagaaattttagatggtcaagaaaaaccagcaactcaattatttgcgaaaaatgtaacagacattaatttcgatatgccaacacgtaagtatgaccttaaaaaagcagaatcattattagatgaagctggttggaagaaaggtaaagacagcgatgttcgtcaaaaagatggtaaaaaccttgaaatggcaatgtactatgacaaaggttcttcaagtcaaaaagaacaagcagaatacttacaagcagaatttaagaaaatgggtattaagttaaacatcaatggcgaaacatcagataaaattgctgaacgtcgtacttctggtgattatgacttaatgttcaaccaaacttggggattattgtacgatccacaaagtactattgcagcatttaaagcgaaaaatggttatgaaagtgcaacatcaggcattgagaacaaagataaaatatacaacagcattgatgacgcatttaaaatccaaaacggtaaagagcgttcagacgcttataaaaacattttgaaacaaattgatgatgaaggtatctttatccctatttcacacggtagtatgacagttgttgcaccaaaagatttagaaaaagtatcattcacacaatcacagtatgaattaccattcaatgaaatgcagtataaataa

SEQ ID NO: 5270 - protein, 532 aa, Staphylococcus aureus
MRKLTKMSAMLLASGLILTGCGGNKGLEEKKENKQLTYTTVKDIGDMNPHVYGGSMSAESMIYEPLVRNTKDGIKPLLAKKWDVSEDGKTYTFHLRDDVKFHDGTPFDADAVKKNIDAVQENKKLHSWLKISTLIDNVKVKDKYTVELNLKEAYQPALAELAMPRPYVFVSPKDFKNGTTKDGVKKFDGTGPFKLGEHKKDESADFNKNDQYWGEKSKLNKVQAKVMPAGETAFLSMKKGETNFAFTDDRGTDSLDKDSLKQLKDTGDYQVKRSQPMNTKMLVVNSGKKDNAVSDKTVRQAIGHMVNRDKIAKEILDGQEKPATQLFAKNVTDINFDMPTRKYDLKKAESLLDEAGWKKGKDSDVRQKDGKNLEMAMYYDKGSSSQKEQAEYLQAEFKKMGIKLNINGETSDKIAERRTSGDYDLMFNQTWGLLYDPQSTIAAFKAKNGYESATSGIENKDKIYNSIDDAFKIQNGKERSDAYKNILKQIDDEGIFIPISHGSMTVVAPKDLEKVSFTQSQYELPFNEMQYK

SEQ ID NO: 5271 - DNA, 456 bp, Staphylococcus aureus
ttgaaaaaattatgttcattaattgtagtagcattagtttgtatcattgcattatcagcttgtggtaaagaacaaaccaaaacatatgaaggtgatgttagtggtaaacatgtactaacttctatcacatataaagatgataaagttttaaaacagtctacaatcaacacaattaaatatgacgatctaggtatggataaagacgaagccaaaaagttattcgccaaatctgaaagtattttcaaagaccttaaaggcgtaaaatacaaagtagactataaagataaaaaagcaattgaacacttagacatagattacacagaagttgacatgaaaaaattaaataaacgtcttggtgtttcgactaaagaaaataaagatattagttttgaaaaacttgaaaagcaattaaagcacagaggtttaaaagaaaaagataaaatggacgacaaatag

SEQ ID NO: 5272 - protein, 151 aa, Staphylococcus aureus
MKKLCSLIVVALVCIIALSACGKEQTKTYEGDVSGKHVLTSITYKDDKVLKQSTINTIKYDDLGMDKDEAKKLFAKSESIFKDLKGVKYKVDYKDKKAIEHLDIDYTEVDMKKLNKRLGVSTKENKDISFEKLEKQLKHRGLKEKDKMDDK

SEQ ID NO: 5273 - DNA, 660 bp, Staphylococcus aureus
atgaaaagaactgataaataccgtgattcatatcaatacgacaatcaaaaccaaaatcatcgtcgtcaatctgaagacgcatcgtatagacaacaatatgctaaaggcgatcctgaagaacacccggaacgatactataatggtagagattatcgaagagaacaaattcttgaagaagaaaacgagaaatcccgccgttcaaaaaaatggttatatatcattattgccattctcttaattattgtcgctatttttgtcacacgcgccttacttaacaatgatagcgataaagttagtaatgaccctaaagtctctcaaaattataaaaaacaagttgaaaatcaagacggccaaattaaccagcaagtagataatgctaaagaaaatattaaaaacaaccaaaaaactgatgacattattaaaaatttacaaaatcaaatcgacaacttgaagcagcaagaacaaaacaaagctgattctaagctaactcaattttatcaagaccaaatcaacaaattgacagaggcaaataatgcacttaaaaacaatgcaagccaaggtaaaattgaaagcatgttaaatgatattaatacaaaattcgacagtattaaatctaaattagaaagcttatttaaagatgacaatggtggcgctaattaa

SEQ ID NO: 5274 - protein, 219 aa, Staphylococcus aureus
MKRTDKYRDSYQYDNQNQNHRRQSEDASYRQQYAKGDPEEHPERYYNGRDYRREQILEEENEKSRRSKKWLYIIIAILLIIVAIFVTRALLNNDSDKVSNDPKVSQNYKKQVENQDGQINQQVDNAKENIKNNQKTDDIIKNLQNQIDNLKQQEQNKADSKLTQFYQDQINKLTEANNALKNNASQGKIESMLNDINTKFDSIKSKLESLFKDDNGGAN

SEQ ID NO: 5275 - DNA, 1359 bp, Staphylococcus aureus
atgaattacacacaacaacttaaacaaaaagactcagaatatgtttggcatccatttacacaaatgggtgtatatagcaaagaagaagcaatcatcattgaaaaaggaaagggtagttacctttacgatacgaatggcaataaatatttagatggttatgcatcgttgtgggtcaatgtgcatggtcataataacaaatacttaaataaggtaattaaaaagcaactcaataaaattgcccattctacgctgctaggatcatcaaatattccgtcaatagaacttgcggaaaaattaatcgaaatcacgccaagtaatctaagaaaagtattttattctgatacaggcagtgcgtctgttgaaatcgcaataaagatggcatatcagtattggaaaaatattgatagagaaaaatatgccaagaaaaacaagtttataacgctaaatcacggttatcatggggatacgattggtgcggtaagtgttggtggtatcaagacctttcataaaatatttaaagacttaatatttgagaatattcaagtagaaagcccatctttctatcgcagtaattacgatactgaaaatgaaatgatgacagctattttaacgaatatagagcaaattctaattgaaagaaatgacgaaatcgcagggtttatattggaaccgttgattcaaggtgcgacaggcttgtttgttcatcctaaaggctttttgaaagaagtcgagaaattgtgcaaaaaatacgatgtcttattaatttgtgatgaggtagcagttggttttgggagaactggaaagatgtttgcatgcaatcatgaagatgttcaaccggatattatgtgtttaggtaaggcgattactggtggctacttaccacttgcagctacattgacatctaaaaaaatatacaatgcatttttaagtgattcgcatggtgtgaatacctttttccatggtcatacatacaccggaaatcaaatcgtttgtacggttgcattagaaaatataagactttatgaaaaacgtaagttattgtcacatattgaaacgacatcatcaacacttgagaaacagttacatgcgctgaagcgtcatcgaaatgttggtgatgtaagaggacgaggcttaatgtttggagttgaattagttacagataaagatagtaaaacgccgttagaaattgaaaaagttgaacgtattgtacgtaattgtaaagaaaacgggctaatgattagaaatttagaaaatgtcattacgtttgtgccagtgttaagtatgtcaaataaagaagtgaaaacgatggtacgtatttttaaaaaggcagtacataacattttagataggaagtgttaa

SEQ ID NO: 5276 - protein, 452 aa, Staphylococcus aureus
MNYTQQLKQKDSEYVWHPFTQMGVYSKEEAIIIEKGKGSYLYDTNGNKYLDGYASLWVNVHGHNNKYLNKVIKKQLNKIAHSTLLGSSNIPSIELAEKLIEITPSNLRKVFYSDTGSASVEIAIKMAYQYWKNIDREKYAKKNKFITLNHGYHGDTIGAVSVGGIKTFHKIFKDLIFENIQVESPSFYRSNYDTENEMMTAILTNIEQILIERNDEIAGFILEPLIQGATGLFVHPKGFLKEVEKLCKKYDVLLICDEVAVGFGRTGKMFACNHEDVQPDIMCLGKAITGGYLPLAATLTSKKIYNAFLSDSHGVNTFFHGHTYTGNQIVCTVALENIRLYEKRKLLSHIETTSSTLEKQLHALKRHRNVGDVRGRGLMFGVELVTDKDSKTPLEIEKVERIVRNCKENGLMIRNLENVITFVPVLSMSNKEVKTMVRIFKKAVHNILDRKC

SEQ ID NO: 5277 - DNA, 1311 bp, Staphylococcus aureus
atgaaaaataaatatatctcgaagttgctagttggggcagcaacaattacgttagctacaatgatttcaaatggggaagcaaaagcgagtgaaaacacgcaacaaacttcaactaagcaccaaacaactcaaaacaactacgtaacagatcaacaaaaagctttttatcaagtattacatctaaaaggtatcacagaagaacaacgtaaccaatacatcaaaacattacgcgaacacccagaacgtgcacaagaagtattctctgaatcacttaaagacagcaagaacccagaccgacgtgttgcacaacaaaacgctttttacaatgttcttaaaaatgataacttaactgaacaagaaaaaaataattacattgcacaaattaaagaaaaccctgatagaagccaacaagtttgggtagaatcagtacaatcttctaaagctaaagaacgtcaaaatattgaaaatgcggataaagcaattaaagatttccaagataacaaagcaccacacgataaatcagcagcatatgaagctaactcaaaattacctaaagatttacgtgataaaaacaaccgctttgtagaaaaagtttcaattgaaaaagcaatcgttcgtcatgatgagcgtgtgaaatcagcaaatgatgcaatctcaaaattaaatgaaaaagattcaattgaaaacagacgtttagcacaacgtgaagttaacaaagcacctatggatgtaaaagagcatttacagaaacaattagacgcattagttgctcaaaaagatgctgaaaagaaagtggcgccaaaagttgaggctcctcaaattcaatcaccacaaattgaaaaacctaaagtagaatcaccaaaagttgaagtccctcaaattcaatcaccaaaagttgaggttcctcaatctaaattattaggttactaccaatcattaaaagattcatttaactatggttacaagtatttaacagatacttataaaagctataaagaaaaatatgatacagcaaagtactactataatacgtactataaatacaaaggtgcgattgatcaaacagtattaacagtactaggtagtggttctaaatcttacatccaaccattgaaagttgatgataaaaacggctacttagctaaatcatatgcacaagtaagaaactatgtaactgagtcaatcaatactggtaaagtattatatactttctaccaaaacccaacattagtaaaaacagctattaaagctcaagaaactgcatcatcaatcaaaaatacattaagtaatttattatcattctggaaataa

SEQ ID NO: 5278 - protein, 436 aa, Staphylococcus aureus [sequence omitted]

SEQ ID NO: 5279 - DNA, 252 bp, Staphylococcus aureus
atgattattaaaaattattcatacgctcgacagaatttaaaggcacttatgacaaaagtaaatgatgatagtgatatggtaactgtaacatctactgatgataaaaacgtagtaatcatgtcagaatcagattataactccatgatggaaacactttacctccaacagaacccaaataatgctgaacacttagctcaatcaattgcagatctagaacgtgggaaaactataacgaaagatatagatgtataa

SEQ ID NO: 5280 - protein, 83 aa, Staphylococcus aureus
MIIKNYSYARQNLKALMTKVNDDSDMVTVTSTDDKNVVIMSESDYNSMMETLYLQQNPNNAEHLAQSIADLERGKTITKDIDV

SEQ ID NO: 5281 - DNA, 267 bp, Staphylococcus aureus
atggctaggttaaatattacgttttcgcctcaagcctttgaagattataagtattttcagcagaacgataaaaaaatggtgaagaagattaatgagttacttaaaagtattgacagaaatggtgcattggaaggtataggtaagcctgaaaagttaaaatcgaatctgactgggtattatagtagacgtatcaatcacgaacatagattggtttatacagtagatgacaatcatataaaaatagcatcatgtaaataccattattaa

SEQ ID NO: 5282 - protein, 88 aa, Staphylococcus aureus
MARLNITFSPQAFEDYKYFQQNDKKMVKKINELLKSIDRNGALEGIGKPEKLKSNLTGYYSRRINHEHRLVYTVDDNHIKIASCKYHY

SEQ ID NO: 5283 - DNA, 1551 bp, Staphylococcus aureus
atgaaaaagaaattaggtatgttacttcttgtaccagccgtaactttatcattagccgcatgtgggaatgatgatggaaaagataaagatggcaaggtaacaattaaaacgacagtttatccattgcaatcatttgcagagcaaattggtggaaaacacgtgaaggtatcatcaatctatccagcagggacagatttacatagctatgaaccaacacaaaaagatatattaagtgcaagcaagtcagacttgtttatgtatacaggggataatttagatccggttgctaagaaagttgcatctactatcaaagataaagataaaaaactgtctttagaggataaattagataaagcaaagcttttaactgatcaacacgagcatggtgaagagcatgaacatgagggacatgatcatgagaaagaagaacatcatcatcatcatggtggatatgatccacacgtatggttagatcctaaaattaaccaaactttcgctaaagaaattaaagatgaattagtgaaaaaagatccaaaacataaagatgactatgagaaaaactacaaaaaattaaacgacgatcttaagaaaattgataacgatatgaagcaagttacaaaagataagcaaggtaatgcagtattcatttcacatgaatcaattggatacttagctgattgttatggttttgttcaaaaaggtattcaaaacatgaatgctgaagatccatcacaaaaagaattaactaaaattgttaaagaaattagagatagcaatgctaaatatattctttacgaagataatgttgcgaataaagtgactgaaacaattcgtaaagaaacagatgcgaagcctttaaaattctacaacatggagtctttaaataaagaacaacagaaaaaagataatattacgtatcaatcattaatgaaatctaatattgaaaatatcggtaaagctttagacagtggtgttaaagtgaaagacgacaaagctgaaagtaaacatgacaaagcaatttctgatgggtattttaaagatgagcaagttaaagaccgtgaattaagcgattatgctggtgaatggcaatctgtttacccttacttaaaagacggtacgcttgatgaagtgatggaacataaagctgaaaatgatccgaagaaatctgctaaagatttaaaagcttattatgacaaaggatataaaactgatattactaacattgatataaaaggaaatgaaattacatttactaaagatggtaagaaacacactggtaaatatgaatacaatggtaagaaaacattgaaatatcctaaaggtaaccgtggcgtgagatttatgtttaaattggtcgatggtaatgataaagacttaccgaaattcatccaatttagcgatcacaacattgcacctaaaaaggcagaacacttccatatctttatgggtaatgataatgacgcgttattaaaagaaatggataactggccaacatattatccttcaaaattaaataaagaccaaatcaaagaagaaatgttagcgcattaa

SEQ ID NO: 5284 - protein, 516 aa, Staphylococcus aureus
MKKKLGMLLLVPAVTLSLAACGNDDGKDKDGKVTIKTTVYPLQSFAEQIGGKHVKVSSIYPAGTDLHSYEPTQKDILSASKSDLFMYTGDNLDPVAKKVASTIKDKDKKLSLEDKLDKAKLLTDQHEHGEEHEHEGHDHEKEEHHHHHGGYDPHVWLDPKINQTFAKEIKDELVKKDPKHKDDYEKNYKKLNDDLKKIDNDMKQVTKDKQGNAVFISHESIGYLADCYGFVQKGIQNMNAEDPSQKELTKIVKEIRDSNAKYILYEDNVANKVTETIRKETDAKPLKFYNMESLNKEQQKKDNITYQSLMKSNIENIGKALDSGVKVKDDKAESKHDKAISDGYFKDEQVKDRELSDYAGEWQSVYPYLKDGTLDEVMEHKAENDPKKSAKDLKAYYDKGYKTDITNIDIKGNEITFTKDGKKHTGKYEYNGKKTLKYPKGNRGVRFMFKLVDGNDKDLPKFIQFSDHNIAPKKAEHFHIFMGNDNDALLKEMDNWPTYYPSKLNKDQIKEEMLAH

SEQ ID NO: 5285 - DNA, 468 bp, Staphylococcus aureus
atgacgattaaagttgaagataataaaattattttttcaagaacgatagaagcaccgattgaaaaggtgtttgatgcctatacgacaaaagcattatttgaaaaatggtttcatccaaaagacgctagtaccaaagtgtttcgctttaatgctgtttcaggcggtgatgcattttatgcgattaaaacacctacaatgaccagctatacattagcagaatataaaacggttaagcgtccatatttaattgaatatattgactcatttgcgacacctcaaggtgcaaaagatacaaaaatgccaagcatgaaaattactttgtcattttccaagagcaatacaacgaaaacgacagtgacatcaacatcggtatttccaacaaaagaagccgctcaacaagtcataaacatgggtgttgaacaaggtatgaatcaaactttagatcaacttgatgctttattgaaataa

SEQ ID NO: 5286 - protein, 155 aa, Staphylococcus aureus
MTIKVEDNKIIFSRTIEAPIEKVFDAYTTKALFEKWFHPKDASTKVFRFNAVSGGDAFYAIKTPTMTSYTLAEYKTVKRPYLIEYIDSFATPQGAKDTKMPSMKITLSFSKSNTTKTTVTSTSVFPTKEAAQQVINMGVEQGMNQTLDQLDALLK

SEQ ID NO: 5287 - DNA, 741 bp, Staphylococcus aureus
ttggcatacacatacactttaaaagatattattgaaattacaggtgtaactaaaagaactttacattattacgatgaaataggattattagttccagataaaaatgataaaaattatcgcgtttataaacagcaagacttagaaaaattacaaaagattttaatactcaagtcttttgattttgatatcgctaaaataaaacaatacatttcgtatgataatgaacaattgcgaaagttattatcagagcaaataagcaagttagataaaaagatttctgacttacaattaattagacgctctgtatgtgaatttattaaaggactctctctaatagataccagcattttaaacaagacactacagtcacaatatgataaagaagcatctataaaatatggtcatacgaaagcatatcaatcatttattagacgtaaagacagcttacaatcgcaggatatcagacataaattgacaactatcttcaataaatttaatcatatgtctttgagtcattatccaatccaagattgtagtgatctcgtatttgagtggaaggcatttatgaacactatcgctgattttgatgatgaaacattatgctgtattgctaaaacatatgaagatgatacgcgtttcaaagattactttaattcatatgataatcaaaatttagcatcatacatttcagaagctgttaattattttttgagcaatgtgaataagagcgacaatttttaa

SEQ ID NO: 5288 - protein, 246 aa, Staphylococcus aureus
MAYTYTLKDIIEITGVTKRTLHYYDEIGLLVPDKNDKNYRVYKQQDLEKLQKILILKSFDFDIAKIKQYISYDNEQLRKLLSEQISKLDKKISDLQLIRRSVCEFIKGLSLIDTSILNKTLQSQYDKEASIKYGHTKAYQSFIRRKDSLQSQDIRHKLTTIFNKFNHMSLSHYPIQDCSDLVFEWKAFMNTIADFDDETLCCIAKTYEDDTRFKDYFNSYDNQNLASYISEAVNYFLSNVNKSDNF

SEQ ID NO: 5289 - DNA, 207 bp, Staphylococcus aureus
atgccttatctctatggtgatgatattaataaacttcaaggtaggcctatcgttggcttatctcatgctgccgggtatgcatgtggctatcacttggtaaaatactttttacaaaaaacaaacatacctattgaagttgctacaacacttccagcacaaaaaataataaatgaggtgactgaattttggcatacacatacactttaa

SEQ ID NO: 5290 - protein, 68 aa, Staphylococcus aureus
MPYLYGDDINKLQGRPIVGLSHAAGYACGYHLVKYFLQKTNIPIEVATTLPAQKIINEVTEFWHTHTL

SEQ ID NO: 5291 - DNA, 1455 bp, Staphylococcus aureus
atgaccaaagaacaacaacttgcagaacgaattattgctgcagtaggtggtatggataatatagatagtgtcatgaactgtatgacacgtgtgcgtattaaagtattagatgagaataaagtagatgaccaagaactaaggcatattgatggtgtcatgggtgttatacacgatgaacgcattcaagttgtggttggacctggtacagtcaataaagtggctaatcatatggcggaattaagtggtgttaaactaggtgacccaataccacaccatcacaatgatagtgaaaaaatggactataaatcatatgcagctgataaagcaaaggcgaataaggaagcgcataaagcaaaacaaaagaatggtaagttgaataaagtattgaaatcaattgccaatatctttataccgttgattcctgcatttattggagctggattaattggtggtattgcagcagtactgagtaacttaatggtggcaggctatatttcaggtgcttggattacgcaacttataacagtatttaatgtcattaaagacggtatgttagcatacttagctattttcactggtattaatgcggctaaagaatttggtgcgacaccaggacttggtggcgtgattggtggtacaacgttattaacgggtattgctggtaaaaatattttaatgaatgtcttcactggagaaccattgcaacctggacaaggtgggattattggcgttatttttgccgtttggattttaagtattgtcgaaaagagattacataaaattgtgccaaatgcgattgatattattgtaacgccgactattgcattgttgattgtaggactattaactatctttatctttatgccattagcaggttttgtttcagacagtttagtttcagtagttaacggaattattagtattggtggcgtatttagtggatttatcattggtgcaagcttcctaccgttagttatgttagggcttcatcatatttttacgccaattcatatagaaatgattaaccaatcaggtgctacttacttattgccaattgcagcgatggctggtgctggacaagtaggtgccgcattagcactttgggtaagatgtaaacgcaacacaacattacgtaatactttaaaaggtgcattgccagttggtttcctaggtatcggagaaccattaatctatggtgtgactttgccattaggtcgacctttcttaactgcttgtattggtggtggtattggtggcgctgtaataggtggaattggacatattggtgccaaagcaataggcccaagtggtgtgtcactattaccattaatctcagataatatgtatttaggttatattgcaggattacttgctgcgtatgctggtggattcgtttgtacatatttatttggaacgacaaaggcgatgcgacagacagatttgttgggtgattaa

SEQ ID NO: 5292 - protein, 484 aa, Staphylococcus aureus
MTKEQQLAERIIAAVGGMDNIDSVMNCMTRVRIKVLDENKVDDQELRHIDGVMGVIHDERIQVVVGPGTVNKVANHMAELSGVKLGDPIPHHHNDSEKMDYKSYAADKAKANKEAHKAKQKNGKLNKVLKSIANIFIPLIPAFIGAGLIGGIAAVLSNLMVAGYISGAWITQLITVFNVIKDGMLAYLAIFTGINAAKEFGATPGLGGVIGGTTLLTGIAGKNILMNVFTGEPLQPGQGGIIGVIFAVWILSIVEKRLHKIVPNAIDIIVTPTIALLIVGLLTIFIFMPLAGFVSDSLVSVVNGIISIGGVFSGFIIGASFLPLVMLGLHHIFTPIHIEMINQSGATYLLPIAAMAGAGQVGAALALWVRCKRNTTLRNTLKGALPVGFLGIGEPLIYGVTLPLGRPFLTACIGGGIGGAVIGGIGHIGAKAIGPSGVSLLPLISDNMYLGYIAGLLAAYAGGFVCTYLFGTTKAMRQTDLLGD

SEQ ID NO: 5293 - DNA, 1380 bp, Staphylococcus aureus
atgaacttttttgatatccataagattccgaacaaaggcattccattatcggtacaacgtaaattatggcttagaaacttcatgcaagctttcttcgtagtgttctttgtttatatggctatgtatttaattcgaaacaactttaaggcggcacaaccgtttttaaaagaggaaattggattatctacattagaacttggttatatcggattagcatttagtatcacgtacggtttaggaaaaacattacttggatattttgtcgatggacgtaacacaaaacgtattatctcgttcttacttatcttatctgcgattacagttttaattatgggatttgttttaagttactttggttctgtaatgggattattaattgtactttggggacttaacggggtgttccaatcagttggtggacctgcaagttattcaacgatttcaagatgggcgccaagaacgaaacgtggccgatacttaggattctggaatacatcacataatatcggtggtgccatagcaggtggtgttgcactttggggtgctaatgtattcttccatggaaatgttatagggatgttcattttcccatcggtgattgcattacttattggtatcgcaacattatttatcggaaaagatgatccggaagaattaggatggaatcgtgctgaagaaatttgggaagagccggtcgataaagaaaatattgattctcaaggtatgacgaaatgggagatctttaaaaaatatatcctgggaaatcctgttatatggattctatgtgtttcaaacgtctttgtatacattgtacgaatcggtattgataactgggcaccgttatatgtgtcagagcatttacactttagtaaaggcgatgcagttaatacgatattctactttgaaattggtgcattagttgcaagtttattatggggctacgtatcagacttattaaaaggtcgtcgtgcaattgtagctattggctgtatgtttatgattacatttgttgtcttattctacacaaatgctacaagtgtcatgatggttaacatttcattgtttgcattaggtgcgttaatctttggtccgcaattattaattggtgtatcattgactggttttgttcctaaaaatgccatcagtgtagcaaacggaatgacaggttcattcgcgtatctattcggtgactcaatggcgaaagttggtttggcggctattgctgatccaacacgtaacggtttaaacatctttggatatacattaagtggatggacagatgttttcatcgtcttctatgttgcattattcctaggcatgattctattaggaatcgttgctttctatgaagaaaagaaaattagaagtttaaaaatttaa

SEQ ID NO: 5294 - protein, 459 aa, Staphylococcus aureus
MNFFDIHKIPNKGIPLSVQRKLWLRNFMQAFFVVFFVYMAMYLIRNNFKAAQPFLKEEIGLSTLELGYIGLAFSITYGLGKTLLGYFVDGRNTKRIISFLLILSAITVLIMGFVLSYFGSVMGLLIVLWGLNGVFQSVGGPASYSTISRWAPRTKRGRYLGFWNTSHNIGGAIAGGVALWGANVFFHGNVIGMFIFPSVIALLIGIATLFIGKDDPEELGWNRAEEIWEEPVDKENIDSQGMTKWEIFKKYILGNPVIWILCVSNVFVYIVRIGIDNWAPLYVSEHLHFSKGDAVNTIFYFEIGALVASLLWGYVSDLLKGRRAIVAIGCMFMITFVVLFYTNATSVMMVNISLFALGALIFGPQLLIGVSLTGFVPKNAISVANGMTGSFAYLFGDSMAKVGLAAIADPTRNGLNIFGYTLSGWTDVFIVFYVALFLGMILLGIVAFYEEKKIRSLKI

SEQ ID NO: 5295 - DNA, 1506 bp, Staphylococcus aureus
atgaatttcgattggataaaaacgcgttcagacttcgatgatgacaagcctgccgttattgatcacgcaaaacaaacatcttggacataccaacaactcaatgcacgcgctgataatatggcacattatttaacatctcaaggtgttaaaaaaggcgatgttatcggtatttttgcgccaaatgatattgcaatattagatttattgtttgcttgttttaaaacaggtgcggtttttttaccattgaattggcggcttaacccaaaagaaattgcagccattgtggaagatgcacaattaaaactgctcttctatgctgaaaaacatttaagttcactcaccgatattgaccaaaacttattgcatatggatattgatgtggcgcaatatgatgaaatcgtaaatccagattatcaccaaccttttcaagcaacacctgttgaaccacaagatcttgcagcattaatttatacaagtggtacaaccggatcacctaaaggtgtgatgttctcatatgaatcatttgttcataacggtgcaaacttagagctgacgtataagttcaattcaaactatattacgattgtatcaacaccaatgttccatgttttagggtttaacgatactgtattaccagtattaatgtcaggtggcacacttattcttcaacgttactttaacggcgaagaattgaatgacatgattgcacaatatcaccctacatttattatcatgattccgacaatgtattatagtacgctacgtgctagtaattttaatcctgaaaattttagagctatggattatatcatccaaggtggttcacaaccattaccaagtatccaagcagcttttaaacaatatggcataaacattattaacggctatggtttaactgaagcacctcttgtacttgttaatacaccggaaaattcaaaacgtaagccaatgagtattggtaaagcagtcatgttcgttgatgcacgtatccttgatgataacggtgaggaagtacctactggtgagattggcgaacttgcaattaaggctaaaaatgtcacgccaggatattggaataaaccagcagagactgccaaagcatttcatggtcgatatttattaactggtgacttagcgaagatggacaacgatggcgatatatttattattgaccgcaaaaaagaattaatcataactggtggcgaaaatgtcttaccatccgaagtcgaaaatgctttagctgagcatccactagtagaccggtgtgtggtcgttggctatgatcatccaaaatatggtgaatcaattgctgcagccattatacttcgcgaagatgaacctcattacgctgaaattttaaatcaacatatgcgaagtcgtttagcaggttataaagtcccaagaatgtatgtaccagtgacacatatgccgttaaacagtacgcagaaaccagataaacttgcgattcgacaaatgatgaatgacaaagtctcgcaaacactttaa

SEQ ID NO: 5296 - protein, 501 aa, Staphylococcus aureus
MNFDWIKTRSDFDDDKPAVIDHAKQTSWTYQQLNARADNMAHYLTSQGVKKGDVIGIFAPNDIAILDLLFACFKTGAVFLPLNWRLNPKEIAAIVEDAQLKLLFYAEKHLSSLTDIDQNLLHMDIDVAQYDEIVNPDYHQPFQATPVEPQDLAALIYTSGTTGSPKGVMFSYESFVHNGANLELTYKFNSNYITIVSTPMFHVLGFNDTVLPVLMSGGTLILQRYFNGEELNDMIAQYHPTFIIMIPTMYYSTLRASNFNPENFRAMDYIIQGGSQPLPSIQAAFKQYGINIINGYGLTEAPLVLVNTPENSKRKPMSIGKAVMFVDARILDDNGEEVPTGEIGELAIKAKNVTPGYWNKPAETAKAFHGRYLLTGDLAKMDNDGDIFIIDRKKELIITGGENVLPSEVENALAEHPLVDRCVVVGYDHPKYGESIAAAIILREDEPHYAEILNQHMRSRLAGYKVPRMYVPVTHMPLNSTQKPDKLAIRQMMNDKVSQTL

SEQ ID NO: 5297 - DNA, 174 bp, Staphylococcus aureus
atgaaacttaatcaacgttacgtaaaagtatttgcattatatttcgtaagtattgttactgcaaatattattgttaaaaataataatttaattaaaacattgatacaaaccatagccgggtacacggtctttgcagttggtttgaagtatttaactaaacgtaaaaataaatga

SEQ ID NO: 5298 - protein, 57 aa, Staphylococcus aureus
MKLNQRYVKVFALYFVSIVTANIIVKNNNLIKTLIQTIAGYTVFAVGLKYLTKRKNK

SEQ ID NO: 5299 - DNA, 936 bp, Staphylococcus aureus
atgaaaagaaagattattatggattgtgatccaggacacgatgatgcaatagcattaattttagcgggggcaattgacagtccactagagatattagctgtaacaacagtcgcaggtaatcaatcagttgacaagaatacgacaaacgccttgaacgtattggatattatgggacgccaagatatagcagtagcgaaaggtgcggataggccgttaattaaaccagctgcctttgcttctgaaatacatggggaatctggattagatggtccgaaactaccgtcgacaccatcacgtcaagcagttgcaatgccagcatcagatgtgattataaacaaagtgatgacgagtgatacacctgtaacaattgtagcgacaggtcctcttacgaatgtagcaacggcattgattcgtgagccaagaatcgctgagcatattgaatctattactttgatgggtggtggtacatttggaaattggacgcctacagcagaattcaatatttgggtagatgctgaagcagcgaagcgtgtttttgaaagtgggattactataaatgtgtttggtttagatgtaacacatcaagttttagccgacgatcacgtgattgaacgctttgaaagtatcaataatcctgttgcacagttcgtcgtagaattattgcaattctttaagaagacatacaagactcactttaatatggatggtggtccaatacatgatgcttgtacaattttgtatttgttacaaccagaattgtttacaatggtacccgttaatatcgacattgaacatcaaagtccactaacttatggcactatggctgtcgatttaaatcatgttacaggtaagcctgccaatgcttattttgctacagcagttgatgttgaagaagtgtggaacttgatagaccataagttacgtacatacgaataa

SEQ ID NO: 5300 - protein, 311 aa, Staphylococcus aureus
MKRKIIMDCDPGHDDAIALILAGAIDSPLEILAVTTVAGNQSVDKNTTNALNVLDIMGRQDIAVAKGADRPLIKPAAFASEIHGESGLDGPKLPSTPSRQAVAMPASDVIINKVMTSDTPVTIVATGPLTNVATALIREPRIAEHIESITLMGGGTFGNWTPTAEFNIWVDAEAAKRVFESGITINVFGLDVTHQVLADDHVIERFESINNPVAQFVVELLQFFKKTYKTHFNMDGGPIHDACTILYLLQPELFTMVPVNIDIEHQSPLTYGTMAVDLNHVTGKPANAYFATAVDVEEVWNLIDHKLRTYE

SEQ ID NO: 5301 - DNA, 1260 bp, Staphylococcus aureus
atgagttacttcactgattttgtaaggggatttttagatttaggtgcaactgttattttaccggttgtcatattcttgcttggcctattctttaggcagaaaattggagcggcatttaggtctggtttaacaataggtgtggcttttgtagggattttcttagtcatcgatttattagttaaaaatttagggccagcagcacaagcgatggttaaaaatttaggcgtcagtctgaatgtgattgatgtaggttggccagcaacatcatctatcgcttgggcatcatctgtcgcagcatttattattccactcggaatcatagttaacgttgtattgctagtaactaaagtgacaaagacgatgaatgtagatatttggaatttttggcattatacgtttacagcagcaatggtttatgccgtatcaggcagtatttggcaagcgttattagcagcagttattttccaaattatctgtttgaaagtagcagattggacagcaccgatgatgagtgagttctttgatttaccaggtgtatcgattgctacaggaagtacaatttcttatgcaccaggtatttacttagttaaattgttacaaaaagtacccggtctgaataagttagatgctgatcctgaaacaattcaaaaacgttttggcgcatttggagagtctatatttgtcggcttaattttaggtttaggtattggtgtgttagcaggttacaaacctggagacatcattaatttaggaatgtcaatggctgcagtaatggtattaatgcctagaatggtaaaaatcttaatggaaggtttaatgccagtttcagagtctgcaagaacatggctaaataaacgttttggcgaacgtgaaatttatattggattggatgcggctgtagcattaggtcatccagcagttatttcgacagcattaattttagtacctatcactgttttattagccgttattttaccaggaaaccaagtactaccttttggtgacttagcaacgataccatttgttgtcgcgtttattgttggtgcagcaagaggaaacattattcattctgtcattgtgggtacgattatgattgcaatttcactatatattgcaacagacgtagcacccattttcacagatatggcgaaaggtacgaatgtacaaatgccaaaaggttcatctgaaatttcaagtattgatcaaggtggtaatatcgttaactgtcttatctttaaactatttagtctattcaattaa

SEQ ID NO: 5302 - protein, 419 aa, Staphylococcus aureus
MSYFTDFVRGFLDLGATVILPVVIFLLGLFFRQKIGAAFRSGLTIGVAFVGIFLVIDLLVKNLGPAAQAMVKNLGVSLNVIDVGWPATSSIAWASSVAAFIIPLGIIVNVVLLVTKVTKTMNVDIWNFWHYTFTAAMVYAVSGSIWQALLAAVIFQIICLKVADWTAPMMSEFFDLPGVSIATGSTISYAPGIYLVKLLQKVPGLNKLDADPETIQKRFGAFGESIFVGLILGLGIGVLAGYKPGDIINLGMSMAAVMVLMPRMVKILMEGLMPVSESARTWLNKRFGEREIYIGLDAAVALGHPAVISTALILVPITVLLAVILPGNQVLPFGDLATIPFVVAFIVGAARGNIIHSVIVGTIMIAISLYIATDVAPIFTDMAKGTNVQMPKGSSEISSIDQGGNIVNCLIFKLFSLFN

SEQ ID NO: 5303 - DNA, 438 bp, Staphylococcus aureus
gtgaaacaacaaaaagacgcatcaaaaccagcacacttttttcaccaagtcattgtaattgctttagtactctttgtatcgaaaataattgaatcatttatgccaattcctatgcctgcatcagtaatcggtttagtattattatttgtattattatgtactggtgctgttaagttaggcgaagtcgaaaaagtaggaacgacactaacaaataacattggcttactcttcgtaccagccggtatctcagttgttaactctttaggtgtcattagccaagcaccatttttaatcattggactaataatcgtctcaacaatactattacttatttgtactggctatgtcacacaaattattatgaaagttacttcgagatctaaaggtgacaaagtcacaaaaaagatcaaaatagaggaggcacaagctcatgattaa

SEQ ID NO: 5304 - protein, 145 aa, Staphylococcus aureus
MKQQKDASKPAHFFHQVIVIALVLFVSKIIESFMPIPMPASVIGLVLLFVLLCTGAVKLGEVEKVGTTLTNNIGLLFVPAGISVVNSLGVISQAPFLIIGLIIVSTILLLICTGYVTQIIMKVTSRSKGDKVTKKIKIEEAQAHD

SEQ ID NO: 5305 - DNA, 405 bp, Staphylococcus aureus
atgaaaaaatcagctgttttaaatgaacatatttcaaaagcaatcgcgacaattggtcattttgatttattaacgattaatgacgctggcatgccaattccaaatgatcatcgtcgtatcgacctagctgtaactaaaaacttaccacgctttattgatgtcttagctacagtgttagaagaaatggaaatccaaaaaatatacttagcagaagaaataaaagaacataaccctacacaattgcaacaaattaaacaattgatttcatcggaaatcgaaatcattttcattcctcacgaagaaatgaaaagtaacttagctcacccattaaataaaggtaatattcgtactggtgaaacaacgccctactctaatattgcattagaatcgaatgttactttttaa

SEQ ID NO: 5306 - protein, 134 aa, Staphylococcus aureus
MKKSAVLNEHISKAIATIGHFDLLTINDAGMPIPNDHRRIDLAVTKNLPRFIDVLATVLEEMEIQKIYLAEEIKEHNPTQLQQIKQLISSEIEIIFIPHEEMKSNLAHPLNKGNIRTGETTPYSNIALESNVTF

SEQ ID NO: 5307 - DNA, 243 bp, Staphylococcus aureus
atgaatcagcacgtaaaagtaacatttgattttactaattataattacggcacatatgacttagcagtaccagcatatttaccgataaaaaacttaatagctttagtattggatagtttggacatttcaatatttgatgtcaatacacaaattaaagtgatgacgaaaggtcaattacttgttgaaaatgatcgactcattgattatcaaatcgctgatggagatattttgaagttactatag

SEQ ID NO: 5308 - protein, 80 aa, Staphylococcus aureus
MNQHVKVTFDFTNYNYGTYDLAVPAYLPIKNLIALVLDSLDISIFDVNTQIKVMTKGQLLVENDRLIDYQIADGDILKLL

SEQ ID NO: 5309 - DNA, 393 bp, Staphylococcus aureus
atgaattttaatgatattgaaacaatggttaagtcgaaatttaaagatattaaaaagcatgctgaagagattgcgcatgaaattgaagttcgttctggatatttaagaaaagctgaacaatataagcgattagaatttaatttgagttttgcactagatgatattgaaagcacagcaaaggacgtacaaactgcaaaatctagtgctaataaggacagtgtaactgttaagggaaaggcgcccaatacgttatatattgaaaaaagaaatttgatgaaacaaaagcttgaaatgttgggtgaagatatcgataaaaataaagaatccctccaaaaagctaaggaaattgctggcgaaaaggcaagtgaatattttaataaagcaatgaattaa

SEQ ID NO: 5310 - protein, 130 aa, Staphylococcus aureus
MNFNDIETMVKSKFKDIKKHAEEIAHEIEVRSGYLRKAEQYKRLEFNLSFALDDIESTAKDVQTAKSSANKDSVTVKGKAPNTLYIEKRNLMKQKLEMLGEDIDKNKESLQKAKEIAGEKASEYFNKAMN

SEQ ID NO: 5311 - DNA, 441 bp, Staphylococcus aureus
atgtgtaaatctaaaatactgttgaaaaatatttttagtgaagaatcagaagttaaagatttaactgaagaaaaatataatcaagattacgaagcattaacatttagctttaaagaggaaacatatcaaagtaggttagctaagaaaacaccgactaaatcgggatatttcgtgacatgttggacaaaagacgaagataattataatcggccatacaaaattgaagagtttgctgattacctgattgttgctgttatcgatgatgaattaaatggctactttctatttcctagggaattattggtagaaaaaggtatcttagcttcatctaagtatcaagggaaaatggcttttagagtttatcctaagtggtgtaatcaattgaataaaacagcagggcaaacacaaaagtggcaatgtaaatatttttttgaatactaa

SEQ ID NO: 5312 - protein, 146 aa, Staphylococcus aureus
MCKSKILLKNIFSEESEVKDLTEEKYNQDYEALTFSFKEETYQSRLAKKTPTKSGYFVTCWTKDEDNYNRPYKIEEFADYLIVAVIDDELNGYFLFPRELLVEKGILASSKYQGKMAFRVYPKWCNQLNKTAGQTQKWQCKYFFEY

SEQ ID NO: 5313 - DNA, 606 bp, Staphylococcus aureus
atgacaccattcataacgtatattacccgtgcacatgtgtccttacatgcattttcattcacagaaatgatacaaatatacgtgatgattatatttttcatcgcgttttgtttcatttcaccagtcatgttttatcaattgtgggcattcattgcacctggattacataataatgaacgtcaatttatttataaatatagttttttcagcgtgttattattctgtgctggcgtcgcttttgcattttatgttggctttccaatgatcattcaattcgcgttaaaattatcattaactttaaacatttcgcctgtcattggctttaaagcatatttgattgaactcatacgttggttattcacatttggtcttctatttcaattaccaatattatttatgggtcttgcaaaattcggtcttatagataccacatcattgaaacattatcgtaaatatatttatttcgcttgctttgtattagcaagtatcattgcaccacccgatttaacattaaatatattactcacattgccactcatattgctctttgagttcagtatgttcatcgttaagttcacatgccgaggcaaaccgccaacacattaa

SEQ ID NO: 5314 - protein, 201 aa, Staphylococcus aureus
MTPFITYITRAHVSLHAFSFTEMIQIYVMIIFFIAFCFISPVMFYQLWAFIAPGLHNNERQFIYKYSFFSVLLFCAGVAFAFYVGFPMIIQFALKLSLTLNISPVIGFKAYLIELIRWLFTFGLLFQLPILFMGLAKFGLIDTTSLKHYRKYIYFACFVLASIIAPPDLTLNILLTLPLILLFEFSMFIVKFTCRGKPPTH

SEQ ID NO: 5315 - DNA, 165 bp, Staphylococcus aureus
atgtttatgactgtaaaagaagttgctcaattgttacgtataagtgaacgccatacttataaacttcttcaaaaaaacgttataccacatactaaaattggcggaaagatattagttaacaaagaaaggttattagaaactttagaaaaaaaggaggttaaataa

SEQ ID NO: 5316 - protein, 54 aa, Staphylococcus aureus
MFMTVKEVAQLLRISERHTYKLLQKNVIPHTKIGGKILVNKERLLETLEKKEVK

SEQ ID NO: 5317 - DNA, 255 bp, Staphylococcus aureus
atgaatttaatcccaagaactagtattgtagtttatttaaaacatatgaaacatgaacgacaaatccgaaaatatggacatatcgttcattcaaatagagatcgtaaatttgtaattatgtatgtgaatgagcaagatgttgatcaaattgtacataaactaatgcaacttaaatacgttagacacattgatggctcaccatataaatacttaaagaaaacttacgaaaaagagaaacacgaaatatataattaa

SEQ ID NO: 5318 - protein, 84 aa, Staphylococcus aureus
MNLIPRTSIVVYLKHMKHERQIRKYGHIVHSNRDRKFVIMYVNEQDVDQIVHKLMQLKYVRHIDGSPYKYLKKTYEKEKHEIYN

SEQ ID NO: 5319 - DNA, 234 bp, Staphylococcus aureus
atgtcagaaataatcgtttatacgcagaatgattgtccaccttgtacatttgtaaaaaattatctaaatgagcatcacattgattttgaagagagaaatatcaacaatcaacaatatcgaaacgaaatgatagattttgatgctttttcaactccgtttattttgttgaatggcaatccaatgtaccatgttgatcttgatgaaatcaacaaagtattaaatatccaagattaa

SEQ ID NO: 5320 - protein, 77 aa, Staphylococcus aureus
MSEIIVYTQNDCPPCTFVKNYLNEHHIDFEERNINNQQYRNEMIDFDAFSTPFILLNGNPMYHVDLDEINKVLNIQD

SEQ ID NO: 5321 - DNA, 570 bp, Staphylococcus aureus
atgtattctcaaaatatttatgtgatacgcaaaggagacatggttattcgaccagcatttgatgatgacgatcaaagaaacggtagtgaaataattcggtttgacaaaacgcgtattcaaaatccttttaaagtccagaaaatcattgaacgctcttgcaaattttatggtaatacttatcttggcaagaaagcagagacaaaccgcattactggcatttctagtaaaccacctattttactaacaccattatttccaacttattttttcccaacacattctgacagacaaaatgaaaatatttggttaaatatgcattatatcgaaagtattaaagaattaaaaaatcgtaaatgtaaagtgacatttattaataatgaatcaatcattcttcatgtttcataccacagtttatggcatcaatataacaattccattttttactattacatggtagataaacaatctcgcatgatatcaaaaaatcccgaccaaccaatagattataataaagccacattgaatgtgtttgaagcattgacacgctattctttatttgaagataaataa

SEQ ID NO: 5322 - protein, 189 aa, Staphylococcus aureus
MYSQNIYVIRKGDMVIRPAFDDDDQRNGSEIIRFDKTRIQNPFKVQKIIERSCKFYGNTYLGKKAETNRITGISSKPPILLTPLFPTYFFPTHSDRQNENIWLNMHYIESIKELKNRKCKVTFINNESIILHVSYHSLWHQYNNSIFYYYMVDKQSRMISKNPDQPIDYNKATLNVFEALTRYSLFEDK

SEQ ID NO: 5323 - DNA, 882 bp, Staphylococcus aureus
atgcaaaataagtcaaaatcgccttttaaaattgcattttctaaatttattcataataaaattgcaatgttatcggttatttttttattaatcataactattgtatcaattatagcgccattaatagctccttttccagtgaaccaacaagatttattaaatataaaaggtgaaatgacagcacaaaacattcttggtacagactctggtggtagggataactttagtcgtttgttatatgcaggtcgtatttcattatccattggaattacatctacaataggaatgcttttgattggaattacagttggagtgatttctggttattttggaggtattgttgatacattattaatgagaataaccgaatttgttatgttatttccatttttaatatttgcaattgtattaaatgctgcacttggagataaaattaaaaatccttatggatctgccataattcttgttctagttattatcgtattaagttggggaggtattgcaagacttgttcgtggtaaagtacttcaagaaaaagaaaatgaatactttttggcagcaaaatcaattggtacacccacatataaaattattttgaaacatcttttgccgaatatattaagtgtagttatcgtacaagcaacattgttatttgccggtatgattgtagtggaatcaggattgagctttttaggattcggaattagtaaagcaataccatcttggggtaatatgttgagtgatgctcaagaaggggatgttataagtggtaaaccgtggatatggatgccacctgctataatgattacattaactatattaagtataaactttgtaggggaagggattaaagatgcttttaatcctagaggtagacgttaa

SEQ ID NO: 5324 - protein, 293 aa, Staphylococcus aureus
MQNKSKSPFKIAFSKFIHNKIAMLSVIFLLIITIVSIIAPLIAPFPVNQQDLLNIKGEMTAQNILGTDSGGRDNFSRLLYAGRISLSIGITSTIGMLLIGITVGVISGYFGGIVDTLLMRITEFVMLFPFLIFAIVLNAALGDKIKNPYGSAIILVLVIIVLSWGGIARLVRGKVLQEKENEYFLAAKSIGTPTYKIILKHLLPNILSVVIVQATLLFAGMIVVESGLSFLGFGISKAIPSWGNMLSDAQEGDVISGKPWIWMPPAIMITLTILSINFVGEGIKDAFNPRGRR

SEQ ID NO: 5325 - DNA, 963 bp, Staphylococcus aureus
atgattaaattaatacttaaaagattagggttaatgatcccgttactaattttaatctcaatagttgtattttcattagcaatcatacaaccaggagatccattttcagatctacaaaacggtaaaataaaacaagaagcaataaatgcacaaagggaaaaattaggtctcaacgactcaataccacatcaatacattagatgggtcaatcatgttatacacggtgatttaggggagtcaatcaaatataaaaggccggtaattgatgttattgaggaaagaattccaaatacaatattactcggtgctatgtcattaattattacttatattatctcatttgctttaggaataacgtcaggtagatattcttacagtttgacggattatactgtgcaaatatttaattatttgatgttagccattccatcttttattgcgggagtatttgcaatttttattttttcttttgaattacaatggttcccgtttcaaggttctgttgatattaaccttaaagaaggtacttttgaatattatatgagtaaaatatatcacacatttttacctgcattcactttaggtttattatctactgctggttatattcaatatttacgtaatgatattattgaaaattctaaaaaagattatgtattgacggcaaggtcaaaaggattatctatgaataaaatttataataaacatatattgagaaattctctaatacctattattacatttttaggtgctgatattgtaagtattttaggtggagccgtgattacggagactatcttttcatataacggtatcggtaaattatttttagaatcggtaataggccaagactatccattaatgatggcattaacgttatttttctcatttttaggtttactgggtaatttgatttctgatattacttatggatttatagatccaagaattagaagtaactag

SEQ ID NO: 5326 - protein, 320 aa, Staphylococcus aureus
MIKLILKRLGLMIPLLILISIVVFSLAIIQPGDPFSDLQNGKIKQEAINAQREKLGLNDSIPHQYIRWVNHVIHGDLGESIKYKRPVIDVIEERIPNTILLGAMSLIITYIISFALGITSGRYSYSLTDYTVQIFNYLMLAIPSFIAGVFAIFIFSFELQWFPFQGSVDINLKEGTFEYYMSKIYHTFLPAFTLGLLSTAGYIQYLRNDIIENSKKDYVLTARSKGLSMNKIYNKHILRNSLIPIITFLGADIVSILGGAVITETIFSYNGIGKLFLESVIGQDYPLMMALTLFFSFLGLLGNLISDITYGFIDPRIRSN

SEQ ID NO: 5327 - DNA, 1716 bp, Staphylococcus aureus
atggggaagctaattaaatatatttcaatacttcttattgtcgttttagtgttgagtgcttgcggaaaaagcagtaataaagatgaaggagtaaaagatgctactaaaacggaaacctcaaaacataaaggtggtaccttaaatgtagcattaacagcaccgccaagtggtgtttattcttcgttattaaatagtacacatgcagattctgtagttgagggatattttaacgaaagcttattagcaactgataaaaaaatacgtcctaaggcatatattgcttcatggaaggacatcgagccggctaagaaaatagaatttaaaattaaaaaaggtattaaatggcatgatggtaatgaattgaaaattgatgattggatttattcaattgaagtcttagctaacaaggactacgaaggtgcttattatccaagtgtagaaaatatccaaggtgcgaaagattatcatgaaggaaaaactgatcatattagcggattgaagaaaatagatgactacactatgcaggttacatttgataaaaaacaagaaaattacttaacaggatttattactggacctttattaagtaaaaaatatttatcagatgtaccaattaaagatttagcgaaatcagataaaatccgaaaatatcctattggtattggaccgtataaagttaagaaaatcgttccaggtgaggctgttcaactcgttaaatttgatgattattggcaaggtaagcctgcactagacaaaatcaatttaaaagttattgatcaagcgcaaattattaaggcaatggaaaaaggcgatattgatgttgcgaatgatgctaccggtgcaatggcaaaagatgctaagtcatctaatgctggtctcaaggtattatctgcgccaagcttagactacggtttaataggattcgtatctcatgattacgataaaaaagctaataaaactggtaaagtgagaccaaaatatgaagacaaagaattacgtaaagcaatgctttatgcaattgatagagaaaaatggatcaaagcgtttttcaatggttacgctagtgaaatcaatagttttgtaccatctatgcattggatagcagccaatcctaaggacctaaatgattacaaatatgatcctgaaaaagctaaaaaaatcttagataagttaggttataaagatagagatggtgacggatttagagaagatcctaaaggtaataaatttgagattaactttaaacattattcaggttctaatcctacttttgaaccaagaactgctgcgataaaagatttctgggaaaaagttggcttgaaaacaaatgtgaagttagtagaattcggtaaatataatgaagacttagcaaatgcatctaaagatatggaagtgtacttcagatcatgggcaggaggtacagatccagatccatcagatttataccacactgatagacctcaaaatgaaatgagaacagttttaccaaaatcagatcaatatttagatgatgcattagacttcgaaaaagtaggcattgatgaaaagaaacgtaaagatatttatgttaaatggcaaaaatatatgaatgatgagttacctggattaccaatgttccaaggtaaatcgataactattgttaacgataaagtacgaaacttagacattgaaattggaactgatcaaagtttatataatttaactaaagaagcttag

SEQ ID NO: 5328 - protein, 571 aa, Staphylococcus aureus
MGKLIKYISILLIVVLVLSACGKSSNKDEGVKDATKTETSKHKGGTLNVALTAPPSGVYSSLLNSTHADSVVEGYFNESLLATDKKIRPKAYIASWKDIEPAKKIEFKIKKGIKWHDGNELKIDDWIYSIEVLANKDYEGAYYPSVENIQGAKDYHEGKTDHISGLKKIDDYTMQVTFDKKQENYLTGFITGPLLSKKYLSDVPIKDLAKSDKIRKYPIGIGPYKVKKIVPGEAVQLVKFDDYWQGKPALDKINLKVIDQAQIIKAMEKGDIDVANDATGAMAKDAKSSNAGLKVLSAPSLDYGLIGFVSHDYDKKANKTGKVRPKYEDKELRKAMLYAIDREKWIKAFFNGYASEINSFVPSMHWIAANPKDLNDYKYDPEKAKKILDKLGYKDRDGDGFREDPKGNKFEINFKHYSGSNPTFEPRTAAIKDFWEKVGLKTNVKLVEFGKYNEDLANASKDMEVYFRSWAGGTDPDPSDLYHTDRPQNEMRTVLPKSDQYLDDALDFEKVGIDEKKRKDIYVKWQKYMNDELPGLPMFQGKSITIVNDKVRNLDIEIGTDQSLYNLTKEA

SEQ ID NO: 5329 - DNA, 801 bp, Staphylococcus aureus
atgcctttagaaatacctacaaagtatgactcccttttaaagaaaaaggtttctttaaaaacgagttttaccttcatgttaatcattgtgcttatcatttggagcttcatttatacgggatttaattttggagatttaatgataggaatacctcaaataggtgatctattcaaacaaatgattccacctgatttcgagtatttacaacaaattacaacgccaatgttagataccattcgaatggctatcgtaagtacagtattaggtagcatcgtttcaataccaattgcgttattatgtgctagcaatatcgttcatcaaaagtggatttcaataccctcgcgctttattttaaatatagttcgtactattccagatttgttattagcagcaatctttgtggctgtatttggaatcggtcaaattccagggatattagcactgtttattttaactatctgtattattggaaaattattatatgaatcattggaaacgatagatccaggtccaatggaagcaatgacggctgttggcgctaataaaataaaatggattgttttcggtgttgtaccacaagccatatcgtcatttatgtcatacgtattatatgcatttgaagtaaatatacgtgcttcagctgtgcttggattagtcggcgctggcggtattggattgttttatgatcaaacacttggtttatttcaatatccaaaaacagcaacgattattttatttactttagttatcgtcgtcgtcattgattacatcagtacgaaagtgagggcacatctcgcatga

SEQ ID NO: 5330 - protein, 266 aa, Staphylococcus aureus
MPLEIPTKYDSLLKKKVSLKTSFTFMLIIVLIIWSFIYTGFNFGDLMIGIPQIGDLFKQMIPPDFEYLQQITTPMLDTIRMAIVSTVLGSIVSIPIALLCASNIVHQKWISIPSRFILNIVRTIPDLLLAAIFVAVFGIGQIPGILALFILTICIIGKLLYESLETIDPGPMEAMTAVGANKIKWIVFGVVPQAISSFMSYVLYAFEVNIRASAVLGLVGAGGIGLFYDQTLGLFQYPKTATIILFTLVIVVVIDYISTKVRAHLA

SEQ ID NO: 5331 - DNA, 627 bp, Staphylococcus aureus
atggaaaaaaatgtagaaaaatcattcataaagataggtttatattttcaaatagcttatatagtactcatggctataactttatgtgggtttgtaatttgctatggactaattttcggccttttctatttattatcaggtagcagagctgattatttaatagtaacaatagttatatcggcaataatttctatatttgtaattatactttcaatcgtacctgtcatcgtattggcatctgacttatttaaagaaaggatttcaaaaggtgtcatattaattgtattggctattatcgctttagtattatgcaactttgtatctgcaatactctggtttgtttcagccatatctattttaggtagaaaaaaattagtagctgcagcagatactaccactattcaaaaaagtaaagggaacgcaaatcaagcatcacataaagacacgtgtaaaaaggaacttgatagtcaagacatgatggaacatcctgaggttaaaaatcccacgactaaaaaccttgaaggatttaacgaagaaatacataaagatgaagctacaactaaagttgtcagtgataacacggaaccgcctattgaatcaaaagaccatgtctcgaaaaaagattga

SEQ ID NO: 5332 - protein, 208 aa, Staphylococcus aureus
MEKNVEKSFIKIGLYFQIAYIVLMAITLCGFVICYGLIFGLFYLLSGSRADYLIVTIVISAIISIFVIILSIVPVIVLASDLFKERISKGVILIVLAIIALVLCNFVSAILWFVSAISILGRKKLVAAADTTTIQKSKGNANQASHKDTCKKELDSQDMMEHPEVKNPTTKNLEGFNEEIHKDEATTKVVSDNTEPPIESKDHVSKKD

SEQ ID NO: 5333 - DNA, 753 bp, Staphylococcus aureus
atgaaatataataaccatgacaaaattagagattttataatcattgaagcatatatgtttcgttttaagaaaaaagtcaagcctgaagtcgatatgactataaaagaatttatattactgacttatttatttcatcaacaagaaaacacacttccatttaagaagattgtttcagatttatgttataaacaatcggatttagtacagcatataaaagtacttgtgaaacattcatatattagtaaagttcgaagtaaaattgatgagcgtaatacttacatttcaatatctgaagaacaacgagagaaaattgcagaacgtgttacattgtttgatcaaatcattaaacaatttaaccttgcagatcaaagtgaatcacagatgataccaaaagatagtaaagaatttctaaacttgatgatgtatacaatgtatttcaagaatattatcaaaaaacatctaacattaagttttgtagaattcacaattctagctattatcacttctcaaaataaaaacatcgttcttcttaaagatttaattgaaacaatccaccataaataccctcaaactgttagagctctcaataatttaaaaaagcaaggctatctaataaaagaacgctcaactgaagatgaaagaaaaattttaattcatatggatgacgcgcagcaagaccatgctgaacaattattagctcaagtgaatcaattattagcagataaagatcatttacatcttgtttttgaataa

SEQ ID NO: 5334 - protein, 250 aa, Staphylococcus aureus
MKYNNHDKIRDFIIIEAYMFRFKKKVKPEVDMTIKEFILLTYLFHQQENTLPFKKIVSDLCYKQSDLVQHIKVLVKHSYISKVRSKIDERNTYISISEEQREKIAERVTLFDQIIKQFNLADQSESQMIPKDSKEFLNLMMYTMYFKNIIKKHLTLSFVEFTILAIITSQNKNIVLLKDLIETIHHKYPQTVRALNNLKKQGYLIKERSTEDERKILIHMDDAQQDHAEQLLAQVNQLLADKDHLHLVFE

SEQ ID NO: 5335 - DNA, 1398 bp, Staphylococcus aureus
atggctaaatataaagatattgctagtgacataagagataaaataatcacaggggattggttttatggaatgaaaataccttcacataggcagttggcgatacagtacaacgtaaatagagtaacgattattaaaagtattgagttattagaagctgaaggatttatctatactaaagtaggtagtggaacatatgttaatgactatttgaatgaagcacatattacaaataagtggtctgaaatgatgttatggtcctctcaacaaagaagtcagtatacggtgcaattaattaataaaattgagacagatgattcgtatatacatataagtaaaggtgaattgggtatatcgttaatgccacatattcaattgaaaaaagccatgtctaatacagccagtcatattgaagacttatcttttggttataataatggctatggttatatcaagttaagagatattatcgttgaacgaatgtcaaagcaaggtataaatgtaggtagagaaaatgtaatgatcacttcaggcgctttacatgccattcaacttttatctattgggtttttaggtcaagatgccataataatttcgaatacaccatcatatattcactctacaaatgtttttgagcaattgaattttagacatattgatgttccttataatcaaattaatgaaattgataccatcattgatagatttattaattttaaaaataaagcgatttatatagaacctaggtttaataacccgacaggtcgttctttaacgaatgagcaaaagaaaaatataattacttatagcgaaagacataatattcctatcattgaagatgatatctttagagatattttctttagcgatccaactccttctatcaaaacttatgataaattgggaaaagttatacatataagcagtttttcaaaaacgattgcaccagcaataagaataggttggattgttgcttctgaaaaaataatagagcaattggcagatgtaagaatgcaaattgactatggatccagtattttgtcacaaatggttgtatatgagatgttgaaaaataagtcttatgataaacacttagtaaagttaaggtatgttttaaaagataaacgagactttatgttaaacatcctcaataatttatttaaggatatagcacattgggaggttccaagtggaggttattttgtatggttagtctttaaaatagatatagatattaaatatttattttacgaattgttaagtaaagaaaaaatattaatcaatccgggttacatttatggcagtaaagaaaagagtataaggctatcttttgcctttgaatcaaatgaaaatattaagcatgcgctctataaaatttatacatatgtgaaaaaggtttaa

SEQ ID NO: 5336 - protein, 465 aa, Staphylococcus aureus
MAKYKDIASDIRDKIITGDWFYGMKIPSHRQLAIQYNVNRVTIIKSIELLEAEGFIYTKVGSGTYVNDYLNEAHITNKWSEMMLWSSQQRSQYTVQLINKIETDDSYIHISKGELGISLMPHIQLKKAMSNTASHIEDLSFGYNNGYGYIKLRDIIVERMSKQGINVGRENVMITSGALHAIQLLSIGFLGQDAIIISNTPSYIHSTNVFEQLNFRHIDVPYNQINEIDTIIDRFINFKNKAIYIEPRFNNPTGRSLTNEQKKNIITYSERHNIPIIEDDIFRDIFFSDPTPSIKTYDKLGKVIHISSFSKTIAPAIRIGWIVASEKIIEQLADVRMQIDYGSSILSQMVVYEMLKNKSYDKHLVKLRYVLKDKRDFMLNILNNLFKDIAHWEVPSGGYFVWLVFKIDIDIKYLFYELLSKEKILINPGYIYGSKEKSIRLSFAFESNENIKHALYKIYTYVKKV

SEQ ID NO: 5337 - DNA, 873 bp, Staphylococcus aureus
atgaataaacttcgagacactacttttctatcatatttatttactatcatattgtggggatctgcatttccaatgataaagattgcgttaaatgattttagtgcagaatcattgtcggcatttcgtttaattttagcaacaataattctcttgccgttcgtaattataaagaaattgcctacccctgaactaagagatatccctgttatttttattttaggattttgtggatttgtgatatatcacacagctttaaattttggtgaaactttgattagtgcaggtatatctggaattctagtctctacaacgcctattttttctagtgctttagcttatatatttttaaaagagcatttttcaaaatggaattggttaagttcactcgtcgcatttataggaatatccattatttcaataagtaaagatgattacacaactattaatgtattaggtgtttttattattttacttgcatcttttagtgaaagtttgtattttactttccagaaaaaatacatagaaaaatacggcttcatcgctttcacactatatacaataatggcaagctcaccatttatgcttatttttattcctgaaatcatcaacgatatacacggcgccacttttacatcaatagtatcggtactttatttagctatattccctactataattccatacgttttgcttgcttatattgtgaagtcagttggtgtctctgatgcaacaatgtctctttatttaacacctatcgtttctttattattatcttatctgttattagacgagctaccaacaacccttgctattataggcggaattatcactctactaggcgttagtttaagtaacttctttcaaaatacataa

SEQ ID NO: 5338 - protein, 290 aa, Staphylococcus aureus
MNKLRDTTFLSYLFTIILWGSAFPMIKIALNDFSAESLSAFRLILATIILLPFVIIKKLPTPELRDIPVIFILGFCGFVIYHTALNFGETLISAGISGILVSTTPIFSSALAYIFLKEHFSKWNWLSSLVAFIGISIISISKDDYTTINVLGVFIILLASFSESLYFTFQKKYIEKYGFIAFTLYTIMASSPFMLIFIPEIINDIHGATFTSIVSVLYLAIFPTIIPYVLLAYIVKSVGVSDATMSLYLTPIVSLLLSYLLLDELPTTLAIIGGIITLLGVSLSNFFQNT

SEQ ID NO: 5339 - DNA, 768 bp, Staphylococcus aureus
atgaaacgattaaacaaattggtattgtatattagttttttgatattagtcattagtttcactgctggttgtggcataggtaaagaagcggaagttaagaaaagctttgaaaaaacattgagtatgtatccgattaaaaatctagaggatttatacgataaagaaggttatcgtgatgacgaatttgataaaaatgataaaggtacatggattattggttctgaaatggttgttcaacctaaaggggaacgtatgaaatcaaaaggtatggttctatatatgaatagaaacactaagactacaaccgggaagtatatagtgagtgaaacacttcatgatgaagatggtagacctaagagtaaagataaagaatatcccgttaaaatggtagacaataaaatcattccaactaaaggtatcaaagacgaaaatataaaaaaagaaatcgagaattttaagttcttcgcgcaatatggcagctttaaagatttgtcgaagtacaaagacggcgatatatcatataatccagaggtaccgagttattcagcaaaatatcaattaactaatgatgactataatgtaaaacaattacgaaaaagatataaaataccaacgaataaagcaccaaagttattgttgaaaggttcgggagacttaaaaggttcatcagttggatataaagacattgaatttacttttgtggagaaaaaaggtgaaaatactttttttactgatagtctacatcttgaaccgagtgaggataaataa

SEQ ID NO: 5340 - protein, 255 aa, Staphylococcus aureus
MKRLNKLVLYISFLILVISFTAGCGIGKEAEVKKSFEKTLSMYPIKNLEDLYDKEGYRDDEFDKNDKGTWIIGSEMVVQPKGERMKSKGMVLYMNRNTKTTTGKYIVSETLHDEDGRPKSKDKEYPVKMVDNKIIPTKGIKDENIKKEIENFKFFAQYGSFKDLSKYKDGDISYNPEVPSYSAKYQLTNDDYNVKQLRKRYKIPTNKAPKLLLKGSGDLKGSSVGYKDIEFTFVEKKGENTFFTDSLHLEPSEDK

SEQ ID NO: 5341 - DNA, 603 bp, Staphylococcus aureus
atgttaattagtcttgtaatcccagtttttgctttgttagttattggtggtattatttggatgattatagaaggtatagtacatatttcaaaaaagaataaagcaattgataacttttttaaccaagttaataaagtaagtgagacatataaattcgctactacttttttatttctaatcttggctacggctggtatttctcaattttatctatattatatagtatcagcgtttcttttttggcttgtcatacttacctttggcattgcaggtatcatttttttaatgccatatggattatgttttctaccgttttataagcaaaaaaagaaaaaacagacatttaaaaaatacatggtttacactacgattggtttgtcaatttgtctaggcttatctctagttttggttcacactacgaaaatttatatggacgaaggtggcgtaagatactattacggtagttttgtaatgaaacaagcgggcggttatgcttatttagctttagcggtactttcaacgttgttaattgttgcgaaaaaagctacaaataaaaataaagaaatcgaaaccgtcgacaatacaaatataacggaaagataa

SEQ ID NO: 5342 - protein, 200 aa, Staphylococcus aureus
MLISLVIPVFALLVIGGIIWMIIEGIVHISKKNKAIDNFFNQVNKVSETYKFATTFLFLILATAGISQFYLYYIVSAFLFWLVILTFGIAGIIFLMPYGLCFLPFYKQKKKKQTFKKYMVYTTIGLSICLGLSLVLVHTTKIYMDEGGVRYYYGSFVMKQAGGYAYLALAVLSTLLIVAKKATNKNKEIETVDNTNITER

SEQ ID NO: 5343 - DNA, 1968 bp, Staphylococcus aureus
atgaatcggcagtccactaagaaagctttactaataccatttgtcatcatgatcatcacagcaattgttttaatgggtgtatggtttatctttaatagtcttatagcactaattgcatctatcgttcttgtcgtgatgattattgttagcatcattttattcagacaagctttaatgaaaatggatagttatgtagatggtttgagtgctcaaatttcaacaacaaataataaagcaatcaaacatttaccaattggtatcattgttttagatgaaaatgatcacatcgaatgggttaaccaatttatgacagatcatatggaagcgaatgtcatttctgaatctgtaaatgaagtatttccaaacattttaaagcaattagatagagtgaaatccgttgaaatagaatataatcagtatcatttccaagtacgttattctgagaatgatcactgcctctatttctttgatataactgaacaagtacaaacaaatgaactatatgaaaattctaaaccaatcattgcgacattatttttagataactacgatgagattacgcaaaatatgaatgatacgcagcgttcggaaatcaactcaatggtaacgcgtgtcattagtcgatgggcaactgagtataatatatttttcaaaagatacagttccgatcaattcgtagcctatttaaatcaaaaaatattagctgacttagaagaatctaaatttgatatcttgagtcaattacgtgaaaaaagtgttggttatcgtgcccaattaacattaagtatcggtgttggtgaaggtactgaaaatttaatcgacttaggtgaattatcacaatcaggcctagacttagcattaggacgcggtggcgaccaagttgcaattaaaagtattaatggtaatgtgcgtttctatggcggtaagactgacccgatggagaaacgtactcgtgtaagagcacgtgtgatctcacatgcgttaaaagatatccttgcagagggtgacaaagtcattatcatgggacataaacgtcctgacttagatgcaattggtgcagcaatcggtgtgtctagatttgcaatgatgaataatttagaagcatacatcgtattaaatgagactgacattgatccaacattacgacgcgtgatgaacgaaatagataaaaagccagagttaagagagcgatttattacatcagatgatgcttgggatatgatgacatctaagacaaccgtagtgattgttgatacgcataaaccggaactggttttagatgaaaatgtcttaaataaagcaaaccgtaaagttgttatcgatcatcatagacgtggtgaaagcttcatctctaatccattgttgatatatatggaaccatacgcaagttcgacagctgaattggtaacagagttactggaatatcaaccaacagaacaacgtttaacacgtcttgaatcaacagtgatgtatgcaggtattattgtagatacaagaaactttacattacgaacaggatcaagaacattcgatgcagcgagttatttacgtgcacatggtgcagatacgattttaacgcaacatttcttaaaagatgatgtggatacttacattaatcgatctgaattaattcgaactgtaaaagttgaagataatggcatagccattgcgcatggttcagacgataaaatttatcatccagtaacagttgcacaagcagcagatgaactgttaagtttagaaggtattgaagcatcatatgttgttgcgagacgtgaagataatctgattggtatatctgcgcgttcactcggttcagtaaatgtccagttaacaatggaagcacttggtggcggtggacatttaaccaatgcggcaacacaacttaaaggtgtgacagtcgaagaggcgatagcacaattacaacaagcaattacagaacaattaagtaggagtgaagatgcatga

SEQ ID NO: 5344 - protein, 655 aa, Staphylococcus aureus
MNRQSTKKALLIPFVIMIITAIVLMGVWFIFNSLIALIASIVLVVMIIVSIILFRQALMKMDSYVDGLSAQISTTNNKAIKHLPIGIIVLDENDHIEWVNQFMTDHMEANVISESVNEVFPNILKQLDRVKSVEIEYNQYHFQVRYSENDHCLYFFDITEQVQTNELYENSKPIIATLFLDNYDEITQNMNDTQRSEINSMVTRVISRWATEYNIFFKRYSSDQFVAYLNQKILADLEESKFDILSQLREKSVGYRAQLTLSIGVGEGTENLIDLGELSQSGLDLALGRGGDQVAIKSINGNVRFYGGKTDPMEKRTRVRARVISHALKDILAEGDKVIIMGHKRPDLDAIGAAIGVSRFAMMNNLEAYIVLNETDIDPTLRRVMNEIDKKPELRERFITSDDAWDMMTSKTTVVIVDTHKPELVLDENVLNKANRKVVIDHHRRGESFISNPLLIYMEPYASSTAELVTELLEYQPTEQRLTRLESTVMYAGIIVDTRNFTLRTGSRTFDAASYLRAHGADTILTQHFLKDDVDTYINRSELIRTVKVEDNGIAIAHGSDDKIYHPVTVAQAADELLSLEGIEASYVVARREDNLIGISARSLGSVNVQLTMEALGGGGHLTNAATQLKGVTVEEAIAQLQQAITEQLSRSEDA

SEQ ID NO: 5345 - DNA, 192 bp, Staphylococcus aureus
atgaaatttagagaattagtaaaacaatcatatgaggatttgaaaaatttgactgtaacttggtataacgtcattgctttaacaatacttgttattgtattaagctcattcacaacaccaatgataggcattccagctggtttattaggtggctcttattatttaaaacgtcgtgaagaaaaaggcaagtaa

SEQ ID NO: 5346 - protein, 63 aa, Staphylococcus aureus
MKFRELVKQSYEDLKNLTVTWYNVIALTILVIVLSSFTTPMIGIPAGLLGGSYYLKRREEKGK

SEQ ID NO: 5347 - DNA, 1572 bp, Staphylococcus aureus
atgatgccacgtaaatttagagttttgcaaattggaggagacgatttagaacctatttttcaacacaaaaaaggtgtgagttgggattacttcgatattggattgtttgaatttgatagtggttatgtagaggctattgaagcgattgttgaagcagaagggcgctttgattttatctatattcaagcaccatactcggagacattaacgaatttattacaaatgataagcgaaccatacaatacgtatgttgatgaatcattttggtcagttgaatatgaacaagacgaaaatgtccaaaaatacgttgttcaaccattacattaccggaatattgaagaacgtaataataaattagaggcagttagcttctcaggacagtatggagataaggtttctcctaagttagcacttgtgcatccgaattttaaaggagatgtcgtttaccaaggtaattcagagctcacattgagtggagaatttgggaaagaatttaaacctatcgcatcttggcaaaataatctcgtttacgataaagataaagtcattcaaatatggccagaatttgatattgatggtgcggtcgagttgcaatatacatttagattgattcagactggcgctgatggtgcattaattgaacaaatcgtattgactgatgatatgttagacagtcctttagagatacctgcgaaaccatttgatgcttatataagtgtaactgttaaggcgcgtgggaacgggacggtacatttaggacctatacacaaacgatggtctagattagacatgggtcaatttttacttggtggtagtcgtttcgtagatagtcaacgacaggaatttatttattatttccaccctggtgatatgaaaccgccactaaacgtatattttagtggttatcgaacagcggaaggtttcgaaggatattatatgatgaaacgtatgaatgcaccgtttttacttatcggcgatcctcgtgttgaaggtggtagtttttatatcggttcatctgaatatgaacaagatattatcaatgttattgacgagacattagaaaagctgaattttaaatcacatgaattaatattatctggtttatctatgggttcatttggtgccttgtattatggtgctcagttaaatcctcaggcaattattgttggtaaaccacttgttaatattggaacgattgctgaacatatgcgattacttagaccagaagagttcggtacagcattagacgtcctggtgtctaatgaaggtgatacatctcaagcgtcgatacaggcattaaatcaaaaattttggcaaacatttcaaaagaaatcattgtcacaaactgtttttgccatagcatatatgcaacatgatgattatgatccacatgcatttcaagagctattacctgtattgacagcacaccaagcaagagtgatgaatcgcagtattcctgggcgacataatgatgattcacctaccattgcaagttggtttgttaatttttacaacattattttggaagacaagtttgggagagttcaacatgctgaaaaacaaaacatttaa

SEQ ID NO: 5348 - protein, 523 aa, Staphylococcus aureus
MMPRKFRVLQIGGDDLEPIFQHKKGVSWDYFDIGLFEFDSGYVEAIEAIVEAEGRFDFIYIQAPYSETLTNLLQMISEPYNTYVDESFWSVEYEQDENVQKYVVQPLHYRNIEERNNKLEAVSFSGQYGDKVSPKLALVHPNFKGDVVYQGNSELTLSGEFGKEFKPIASWQNNLVYDKDKVIQIWPEFDIDGAVELQYTFRLIQTGADGALIEQIVLTDDMLDSPLEIPAKPFDAYISVTVKARGNGTVHLGPIHKRWSRLDMGQFLLGGSRFVDSQRQEFIYYFHPGDMKPPLNVYFSGYRTAEGFEGYYMMKRMNAPFLLIGDPRVEGGSFYIGSSEYEQDIINVIDETLEKLNFKSHELILSGLSMGSFGALYYGAQLNPQAIIVGKPLVNIGTIAEHMRLLRPEEFGTALDVLVSNEGDTSQASIQALNQKFWQTFQKKSLSQTVFAIAYMQHDDYDPHAFQELLPVLTAHQARVMNRSIPGRHNDDSPTIASWFVNFYNIILEDKFGRVQHAEKQNI

SEQ ID NO: 5349 - DNA, 960 bp, Staphylococcus aureus
atgctgaaaaacaaaacatttaaagttacttggaattatatttcacaaactacatttatgtatggctctaaagtatcattttcaaatggtgaagtgacttttataaatcctttgatgccctctggattaccgattcatgagtggttgatgttaaagcaattttcaaaatataaaagtgcgccaagtttaccaattttgcgtagaggacagcattataaattgcattttgattttgatgcaacgcctgctggttcagtgtattttatcatcattttttataataaaaatggcacaaaactaagtactgagattgtaaagtcaaatagtattacgattcaatatcctgatgaagcctatgcttataaaataaaaatgatgaatgcagcatcgacgagtcttatatttagatgtttaacaatcacagagatgacgcatcaatatgatttagagtataaaagcatgcgggtgacgaagataggcgatgaccaatatggaaatgatatgatcaatgtcattattgcagaaccatctgacacctatccaactatttcgaatgattttttgaaactgtttggtcatgtttggctcgttgaacgttggatggacgacaatatcgagggaaatattaagcaactaaagaatgatttgcaaagtcaagataccctaaaggctattaatttgattagttatgggtcaaagtcaaatgtttttgcaacttatgtcgctcagcatttgggttgcaaagtgtatcgtacaagccatgaagatgatgatttaaaaggatggcttacagaacatgtcccaggaaatcatgaactaaaagatacaaatgtcgaggtttattttaaagaagagcaagacaaacatctaaattatatgtcacgtttaatgaatccagtacgatttttagattacttagatgtatcgaaactgaatggtggggaagtaaatgaaacataa

SEQ ID NO: 5350 - protein, 319 aa, Staphylococcus aureus
MLKNKTFKVTWNYISQTTFMYGSKVSFSNGEVTFINPLMPSGLPIHEWLMLKQFSKYKSAPSLPILRRGQHYKLHFDFDATPAGSVYFIIIFYNKNGTKLSTEIVKSNSITIQYPDEAYAYKIKMMNAASTSLIFRCLTITEMTHQYDLEYKSMRVTKIGDDQYGNDMINVIIAEPSDTYPTISNDFLKLFGHVWLVERWMDDNIEGNIKQLKNDLQSQDTLKAINLISYGSKSNVFATYVAQHLGCKVYRTSHEDDDLKGWLTEHVPGNHELKDTNVEVYFKEEQDKHLNYMSRLMNPVRFLDYLDVSKLNGGEVNET

SEQ ID NO: 5351 - DNA, 1119 bp, Staphylococcus aureus
atgaataaacaacaaagtaaagtacgctattcaattagaaaagttagtattggaattttgtcaatttcaataggtatgtttttggcattgggtatgtcgaacaaagcatatgcagatgaaattgataaatctaaagattttacaagagggtatgagcaaaatgtattcgcgaaatcagagttaaatgctaataaaaatacgacaaaagacaaaataaaaaatgaaggtgctgttaaaacatcggacacaagtttaaagttagacaacaaatcagcaatttcaaacggaaatgaaattaatcaagatataaagatttcaaatactccgaaaaactcaagccaaggtaacaatctagttattaataacaatgaacttactaaagaaattaaaattgcaaacttggaagctcaaaattctaatcagaagaaaacgaataaagttactaataattactttggttactacagttttagagaagctccaaaaacacaaatctatactgtaaaaaaaggagacacacttagtgctatagcattaaaatacaaaactacagtttcaaatattcaaaatacaaataatatagcaaatcctaatttaatatttattggtcaaaaattaaaagtgccaatgacaccattagtagaaccaaaaccaaaaacagtgtcttcaaataataaaagtaatagtaatagcagtacattaaattatttgaaaacattagagaatagaggatgggatttcgacggtagttatggatggcaatgtttcgatttagttaatgtatattggaatcatctttatggtcatggattaaaaggatatggagctaaagatataccatatgcaaataattttaatagtgaagctaaaatttatcacaacacaccaactttcaaagctgaacctggggacttagtggtttttagtggaagatttggtggaggatatggtcatacagctattgtcttaaatggtgattatgatggaaaattaatgaagttccaaagtttagatcaaaactggaataatggtggatggcgtaaagcagaggttgcacataaagttgttcataattatgaaaatgatatgatttttattagaccatttaaaaaagcataa

SEQ ID NO: 5352 - protein, 372 aa, Staphylococcus aureus
MNKQQSKVRYSIRKVSIGILSISIGMFLALGMSNKAYADEIDKSKDFTRGYEQNVFAKSELNANKNTTKDKIKNEGAVKTSDTSLKLDNKSAISNGNEINQDIKISNTPKNSSQGNNLVINNNELTKEIKIANLEAQNSNQKKTNKVTNNYFGYYSFREAPKTQIYTVKKGDTLSAIALKYKTTVSNIQNTNNIANPNLIFIGQKLKVPMTPLVEPKPKTVSSNNKSNSNSSTLNYLKTLENRGWDFDGSYGWQCFDLVNVYWNHLYGHGLKGYGAKDIPYANNFNSEAKIYHNTPTFKAEPGDLVVFSGRFGGGYGHTAIVLNGDYDGKLMKFQSLDQNWNNGGWRKAEVAHKVVHNYENDMIFIRPFKKA

SEQ ID NO: 5353 - DNA, 1251 bp, Staphylococcus aureus
atgagcttttttaaacgcttaaaagataagtttgcaacaaataaagaaaatgaagaagttaaatccttaacagaagaacaaggtcaagacaaattagaagatacacattctgaaggttcaacgcaggacgcaaatgatttagcagaaaatgctgaagtgaaaaagaagccacgcaagttgagtgaagcggattttgatgacgatggcttaatatcaattgaagattttgaagaaattgaagctcaaaaaatgggtgctaaatttaaagcaggactcgaaaaatctcgtcaaaatttccaagaacaattaaataatttgatagcgagatatcgtaaagtagatgaagacttttttgaagctttagaagaaatgttaatcactgcagacgtcggttttaatacagtgatgacgttaactgaagaattacgtatggaagcacaacgacgtaatattcaagatactgaagatttgcgtgaagtcattgttgaaaaaatcgtagagatttaccatcaagaagatgataattcagaagctatgaacttagaagatggtcgtttaaatgtcattttaatggttggtgtgaatggtgttggtaaaacaacaacaattggaaaattagcttaccgatataaaatggaaggtaaaaaagtaatgttagctgcgggcgatacttttagagcgggtgctattgatcaattgaaagtttggggcgaacgtgttggtgtagacgtaattagccaaagtgaaggttctgatccagctgctgttatgtatgatgcgattaatgccgctaaaaacaaaggtgttgatattttaatctgtgataccgctggacgtttacaaaataaaacaaatctaatgcaagaattagaaaaagttaagcgtgtaattaatcgagcagtgccagatgcgcctcatgaagcattactatgtttagatgctacaactggtcagaatgcgttgtcacaagctagaaactttaaagaagtaacaaatgttacaggtattgtattaacgaaattagatggtacagccaaaggtggtatcgtattagccattcgtaatgaattgcacatcccagttaaatatgtaggtttaggtgagcaattagatgacttacaaccatttaaccctgaaagttatgtctacggcttattcgctgatatgattgaacaaaatgaagaaataacaacagttgaaaatgatcaaattgtaacagaagaaaaggacgataatcatgggtcaaaatga

SEQ ID NO: 5354 - protein, 416 aa, Staphylococcus aureus
MSFFKRLKDKFATNKENEEVKSLTEEQGQDKLEDTHSEGSTQDANDLAENAEVKKKPRKLSEADFDDDGLISIEDFEEIEAQKMGAKFKAGLEKSRQNFQEQLNNLIARYRKVDEDFFEALEEMLITADVGFNTVMTLTEELRMEAQRRNIQDTEDLREVIVEKIVEIYHQEDDNSEAMNLEDGRLNVILMVGVNGVGKTTTIGKLAYRYKMEGKKVMLAAGDTFRAGAIDQLKVWGERVGVDVISQSEGSDPAAVMYDAINAAKNKGVDILICDTAGRLQNKTNLMQELEKVKRVINRAVPDAPHEALLCLDATTGQNALSQARNFKEVTNVTGIVLTKLDGTAKGGIVLAIRNELHIPVKYVGLGEQLDDLQPFNPESYVYGLFADMIEQNEEITTVENDQIVTEEKDDNHGSK

SEQ ID NO: 5355 - DNA, 135 bp, Staphylococcus aureus
atgactggactagcagaagcaatcgcaaatactgtgcaagctgcacaacaacatgatagtgtgaaattaggcacaagtatcgtagacatcgttgctaacggtgtgggtttactaggtaaattatttggattctaa

SEQ ID NO: 5356 - protein, 44 aa, Staphylococcus aureus
MTGLAEAIANTVQAAQQHDSVKLGTSIVDIVANGVGLLGKLFGF

SEQ ID NO: 5357 - DNA, 948 bp, Staphylococcus aureus
atgagacttcaaaaagcacctctagtaacgtcaggactagtcttaggattattaggcctgggtaatctattaaaagacttatctcttactttaaacgctgtttgcggaatctttgctttcttgatttggattcaccttttatgtactatgatcaaatattttaataatgtgaaagaacaattaaacagtcctctagtttcatcagtgttcacaacatttttcatgtctggctttttaggtactacttatttaaatacattttttagtaacataacttttatcaatagcttaataacgcctatttggattttatgccttgtgggaattatgacgcatatgattattttttcaataaaatatttaaaagatttttcacttaaaaatgtttatccttcgtggactgtactttttattggtattgctatcgcaggattgacggcacccgttagcggatattttttcataggtcaattaacagtaatatatggctttgtagctacttgtattgtcttacctatagttttcaagcgattaaaagcatttccattgcagacgtcaatcaaaccgaacacatcgacaatttgtgcaccattttctttagtcgctgcagcatatgttatagcttttcctaaggcgaatgcttttatcgtaattatatttttactattagctcaaatattttatttttatatcattatacaattgcctaaattactaaaagaacctttttcgcccgtattttcagctttcacattccctttagtaatctcagcaactgctttaaagaacagtttgcctgtacttatgtttccagacatttggaaaggtcttttgtttatcgaagtgttattagccactgtaatagtacttagagtctttataggatatcttcacttctttttaaaaaaggaaaaacaagataaatttcttcgtaatgcgtctcagtaa

SEQ ID NO: 5358 - protein, 315 aa, Staphylococcus aureus
MRLQKAPLVTSGLVLGLLGLGNLLKDLSLTLNAVCGIFAFLIWIHLLCTMIKYFNNVKEQLNSPLVSSVFTTFFMSGFLGTTYLNTFFSNITFINSLITPIWILCLVGIMTHMIIFSIKYLKDFSLKNVYPSWTVLFIGIAIAGLTAPVSGYFFIGQLTVIYGFVATCIVLPIVFKRLKAFPLQTSIKPNTSTICAPFSLVAAAYVIAFPKANAFIVIIFLLLAQIFYFYIIIQLPKLLKEPFSPVFSAFTFPLVISATALKNSLPVLMFPDIWKGLLFIEVLLATVIVLRVFIGYLHFFLKKEKQDKFLRNASQ

SEQ ID NO: 5359 - DNA, 708 bp, Staphylococcus aureus
ttggtagtattgttatcttatagttgcagttgtatttttagttttctatatcaatttatatctatagaagaaacgtcatttgattatttacatagaagatcgaaatgtgattattgtaattcgtcactcaaatggtatgaattaatgccgattattagttttttattattaaaagggcgatgtcgaaactgtcgaaagcgtatttccctaacacatttcttaggggaaacctttgctttaatacctatcgtctttattaagtatgatttcacatacgtaaatgctacgctatttataactacatatgtttttctgcttatttttactatgaccgatatcacttctttaatgttagattgtcgcttaattataatttattgtatcgtttctctctcgttaagtatgatttatccagtagcttttatcattattagtatgaccacgcatatattctactttttatttcgggcatatattggttatggtgacgttttactaatatctgcactttctttgtttttccctctccaattcactatttatgtcattttatttacatttgtcattgctggtttagttgctttaattaccatgatatttaagccgattaaactattaccccttgttccatttatatttatttccttttttatcaattcacttttttataatgatatccatcaatttttaggaggcgtatatttttga

SEQ ID NO: 5360 - protein, 235 aa, Staphylococcus aureus
MVVLLSYSCSCIFSFLYQFISIEETSFDYLHRRSKCDYCNSSLKWYELMPIISFLLLKGRCRNCRKRISLTHFLGETFALIPIVFIKYDFTYVNATLFITTYVFLLIFTMTDITSLMLDCRLIIIYCIVSLSLSMIYPVAFIIISMTTHIFYFLFRAYIGYGDVLLISALSLFFPLQFTIYVILFTFVIAGLVALITMIFKPIKLLPLVPFIFISFFINSLFYNDIHQFLGGVYF

SEQ ID NO: 5361 - DNA, 624 bp, Staphylococcus aureus
atgaggatttcaagcttaactttaggcttagttgatactaatacgtatttcatcgaaaatgacaaagctgttattctgattgacccttcaggtgaaagtgaaaaaattattaaaaaattaaaccaaataaataaaccgttaaaagctattttattaacacatgcacactttgatcatatcggagcagtcgatgatatagttgatcgattcgatgtcccggtttatatgcatgaagcagagtttgattttctaaaagatcccgttaaaaatggggcagataaatttaagcaatatggattaccaattattacaagtaaggtaactcctgaaaagttaaacgaaggtagcacagaaatagaaggatttaagtttaatgtgttacacacacctggacattcaccaggaagtttaacatatgtgttcgatgaattcgcagttgttggagatacattatttaataatggaatcggacgtacagatttatataaaggtgattatgaaacgctagttgattctattcaagataaaatatttgaattagaaggcgatttacctttattccctggacatggtccatatacgacggttgatgatgaacaattaaatccatttttacacggttaa

SEQ ID NO: 5362 - protein, 207 aa, Staphylococcus aureus
MRISSLTLGLVDTNTYFIENDKAVILIDPSGESEKIIKKLNQINKPLKAILLTHAHFDHIGAVDDIVDRFDVPVYMHEAEFDFLKDPVKNGADKFKQYGLPIITSKVTPEKLNEGSTEIEGFKFNVLHTPGHSPGSLTYVFDEFAVVGDTLFNNGIGRTDLYKGDYETLVDSIQDKIFELEGDLPLFPGHGPYTTVDDEQLNPFLHG

SEQ ID NO: 5363 - DNA, 435 bp, Staphylococcus aureus
ttgcaaattagaaagcagtcagcatttactatgattgagatgcttgtggtaatgatgttaatcagtatatttctacttttgacaatgacatctaaaggattaagcaatcttagagtaatagatgatgaggcaaatatcatttcttttattactgaattgaattatattaagtcgcaagctatagcaaatcaaggatatatcaatgttagattttatgaaaacagtgacactattaaagtaatagagaataataaaatacgatttctaaaattaaaagtaggcaaaataattaatgttgcaaaagttgatattattgcctttgataaaaaagggaatatcaataaatttggtagcataacaatttacaataacaattcaatttatagaataatattccatattgaaaaaggaagaattcgttatgaaaagctataa

SEQ ID NO: 5364 - protein, 144 aa, Staphylococcus aureus
MQIRKQSAFTMIEMLVVMMLISIFLLLTMTSKGLSNLRVIDDEANIISFITELNYIKSQAIANQGYINVRFYENSDTIKVIENNKIRFLKLKVGKIINVAKVDIIAFDKKGNINKFGSITIYNNNSIYRIIFHIEKGRIRYEKL

SEQ ID NO: 5365 - DNA, 930 bp, Staphylococcus aureus
atgaaaaaattcattggatcagttttagctacgacattaattttagggggatgttccacgatggaaaatgaatcaaaaaaagacacaaaaacagaaacaaaatctgtaccagaagaaatggaagcttcaaaatatgtaggccaaggctttcaaccgcctgcagaaaaaaatgcgattgaatttgcgaagaagcatcgtaaagaatttgaaaaagtaggtgaacaattctttaaagataactttggactaaaagttaaagctacaaatgttgtaggtaaagatgatggtgtagaagtttatgtgcattgtgaagatcatggcattgtatttaatgcaagtctacctttgtacaaagatgccatccatcaaaaaggatcaatgcgcagtaatgacaatggtgatgatatgagtatgatggtgggtacagtgctgagtggctttgaatatcgagcgcaaaaagaaaagtatgataacttatataaattcttcaaagaaaatgaaaagaaatatcaatatacaggctttacaaaagaggcaattaacaagacacaaaatgtcggatataaaaatgaatatttttatattacatactcttctagaagtttaaaagaatatcgaaagtattatgaaccactgattcgaaaaaatgataaagaatttaaagaaggaatggaacgagcaagaaaagaagtgaattacgctgcaaatacagatgctgttgctacacttttttctactaagaaaaactttactaaagacaatacagtagatgatgtaatcgaactaagtgataaattatataatttaaaaaataaaccagataaatctacaatcacaatacaaatagggaaacccactattaatactaagaaagccttttatgatgataatcgtccaatagaatatggggtgcacagtaaagatgaataa

SEQ ID NO: 5366 - protein, 309 aa, Staphylococcus aureus
MKKFIGSVLATTLILGGCSTMENESKKDTKTETKSVPEEMEASKYVGQGFQPPAEKNAIEFAKKHRKEFEKVGEQFFKDNFGLKVKATNVVGKDDGVEVYVHCEDHGIVFNASLPLYKDAIHQKGSMRSNDNGDDMSMMVGTVLSGFEYRAQKEKYDNLYKFFKENEKKYQYTGFTKEAINKTQNVGYKNEYFYITYSSRSLKEYRKYYEPLIRKNDKEFKEGMERARKEVNYAANTDAVATLFSTKKNFTKDNTVDDVIELSDKLYNLKNKPDKSTITIQIGKPTINTKKAFYDDNRPIEYGVHSKDE

SEQ ID NO: 5367 - DNA, 162 bp, Staphylococcus aureus
atgagcaacatttataaaagctacttaatagcagtactgtgcttcacagtcttagcgattgtactcatgccgtttctatacttcactacagcatggtcaattgcgggattcgcaagtatcgcaacattcacattttataaggaatacttttatgaagaataa

SEQ ID NO: 5368 - protein, 53 aa, Staphylococcus aureus
MSNIYKSYLIAVLCFTVLAIVLMPFLYFTTAWSIAGFASIATFTFYKEYFYEE

SEQ ID NO: 5369 - DNA, 618 bp, Staphylococcus aureus
atgcaatctcgatacatcgctagaatttactttttaattttatttatcgtctccctttttgagactaaaatttttcaatttatgactttaaatttgtttttagcatatataccttttgagcttagtctattattacgattattcaaaccgaataaaaagtatgaatggccactctttatcatatatagttttatatttgtgttacttttaccaaatacattttatatggtaactgatttaatccatttgaaccaatttcaattcaacttttacgcaggactaaatttaagtgagtggaaatactttacctatttactgcttggtgtcttcttagcggtttatgtgatgattttaatctattttgaaatactaacattgacttctcaccgttggcttaatagattaattgttgtcgtgctaatgtttttaaatggattcggaatttatattggtcgtttcttacgcttacattccgtttatttctttaatgagcccttacatgttctaaatcacattctagaaagtctaacgcttaaaactgctatgtttgtatgttttatggttgtcatgcaagcagcaattctattatttggaaaaggagtgcgtttgaacaagtga

SEQ ID NO: 5370 - protein, 205 aa, Staphylococcus aureus
MQSRYIARIYFLILFIVSLFETKIFQFMTLNLFLAYIPFELSLLLRLFKPNKKYEWPLFIIYSFIFVLLLPNTFYMVTDLIHLNQFQFNFYAGLNLSEWKYFTYLLLGVFLAVYVMILIYFEILTLTSHRWLNRLIVVVLMFLNGFGIYIGRFLRLHSVYFFNEPLHVLNHILESLTLKTAMFVCFMVVMQAAILLFGKGVRLNK

SEQ ID NO: 5371 - DNA, 285 bp, Staphylococcus aureus
gtgacaataaatataatcgttttaatagtatctatcattgtctttcaattgattattggacacatatggcatgatattggtttaagttatttaagaagtatcttactcatgatgctgccatttggactaggtgtatttatacaacaagtgtcgtattacgaacgacaatatcctaaatggcaagtgcctcaaaacataaaagttagattgaaatatatttatctcgctacgtttttagagtatgtcgtactatacctcactttatttacggacatactaagataa

SEQ ID NO: 5372 - protein, 94 aa, Staphylococcus aureus
MTINIIVLIVSIIVFQLIIGHIWHDIGLSYLRSILLMMLPFGLGVFIQQVSYYERQYPKWQVPQNIKVRLKYIYLATFLEYVVLYLTLFTDILR

SEQ ID NO: 5373 - DNA, 753 bp, Staphylococcus aureus
atgaattatttatcaaacttttttaatacgacaattcaacttaatatatacattatcgttattgttgcagcttgttatattgctattcatcaatatagacataagcctgttttgaactatttagatgtcattttaaactatatccctgttttaacacatgaatttggtcatgtactgtttaataaactcgctggtggccgtgcaaaagatttagtcattgtaacaagtccacgagagcgacaacagacattacaacaaggattcgcaattacacaatctagacatctagcaggccaatggcttacaacgattggtggttattttatgccacctattatgttattgataggtttagcgtcgagccattatcagatacctagtttctttatatttacctatttattgatatttatttattttttaattttaacatctagaaaaggctcacccattgttgttataactttaatttctatcatgttgtattttatattaaaagatgaaaatatagtagaaattcaactacttgtcacaatgagttatcaatatattttaggtgtattattaggcgaagttctacaatctagttggacgattgctaaattgactttccagcgtccgagtccacagtgggatggtagtgcacttaaagaactcagtcatgtacctatcttcatttatagtacaatctggattatcttcaatctttatgcagtgaatattttactcaaatatactcacttgataaattaa

SEQ ID NO: 5374 - protein, 250 aa, Staphylococcus aureus
MNYLSNFFNTTIQLNIYIIVIVAACYIAIHQYRHKPVLNYLDVILNYIPVLTHEFGHVLFNKLAGGRAKDLVIVTSPRERQQTLQQGFAITQSRHLAGQWLTTIGGYFMPPIMLLIGLASSHYQIPSFFIFTYLLIFIYFLILTSRKGSPIVVITLISIMLYFILKDENIVEIQLLVTMSYQYILGVLLGEVLQSSWTIAKLTFQRPSPQWDGSALKELSHVPIFIYSTIWIIFNLYAVNILLKYTHLIN

SEQ ID NO: 5375 - DNA, 816 bp, Staphylococcus aureus
atgtcaaagcgtctattattgtttgattttgatgaaacatattttaaacataatacaaatgaagaagatttaagtcatttaagagaaatggaaaaattgttggaaaaactaactaataataatgaagtgatcactgctgtattgacaggaagtacatttcaaagtgtcatggataaaatggatcaagttaatatgacgtttaaaccattacatatcttttctgatttgagttctaaaatgttcacttggaataatggcgaatatgttgaatcagaaacatataaaaagaaagtcttgagcgaaccatttttatttgaagatattgaagatatattacgtcatatttctgcgcaatataatgtcgaatttattccacaaagagcatttgaaggtaatgaaacacattataatttttattttcattcaacaggtaatcacaacaatgatagtcgtatcctagaagcacttgtcagatacgcaaatgaccaaaactatacagcgagatttagtcgaagcaatccattagctggtgatcctgaaaatgcgtatgatattgacttcacaccgtcaaatgctggaaaattatatgctactcaatttctgatgaggaaatataatataccagtaaaatcaatattaggttttggagatagcggcaatgacgaagcatatttaagctatcttgaacatgcatatttgatgtcgaatagtagagatgaagcattaaagcagaaatttagattaacaaaatatccatattatcaagggataacactgcatgttaaagaatttgttgaaggtaagtatgattattga

SEQ ID NO: 5376 - protein, 271 aa, Staphylococcus aureus
MSKRLLLFDFDETYFKHNTNEEDLSHLREMEKLLEKLTNNNEVITAVLTGSTFQSVMDKMDQVNMTFKPLHIFSDLSSKMFTWNNGEYVESETYKKKVLSEPFLFEDIEDILRHISAQYNVEFIPQRAFEGNETHYNFYFHSTGNHNNDSRILEALVRYANDQNYTARFSRSNPLAGDPENAYDIDFTPSNAGKLYATQFLMRKYNIPVKSILGFGDSGNDEAYLSYLEHAYLMSNSRDEALKQKFRLTKYPYYQGITLHVKEFVEGKYDY

SEQ ID NO: 5377 - DNA, 264 bp, Staphylococcus aureus
gtgagcgaaagaaacgatcgtaaagtttatgtaggtaaagttgtttcagacaaaatggacaagactattacagtacttgttgaaacttacaaaacacacaaattatacggtaaacgagtaaaatactctaaaaaatacaaaactcatgatgaaaacaattcagctaaattaggagacattgttaaaattcaagaaactcgtcctttatcagcaacaaaacgttttcgtttagtagagattgttgaagagtcagtaattatttaa

SEQ ID NO: 5378 - protein, 87 aa, Staphylococcus aureus
MSERNDRKVYVGKVVSDKMDKTITVLVETYKTHKLYGKRVKYSKKYKTHDENNSAKLGDIVKIQETRPLSATKRFRLVEIVEESVII

SEQ ID NO: 5379 - DNA, 279 bp, Staphylococcus aureus
atggctcgtagtattaaaaaaggacctttcgtcgatgagcatttaatgaaaaaagttgaagctcaagaaggaagcgaaaagaaacaagtaatcaaaacatggtcacgtcgttctacaattttccctaatttcatcggacatacttttgcagtatacgacggacgtaaacacgtacctgtatatgtaactgaagatatggtaggtcataaattaggtgagtttgctcctactcgtacattcaaaggacacgttgcagacgacaagaaaacaagaagataa

SEQ ID NO: 5380 - protein, 92 aa, Staphylococcus aureus
MARSIKKGPFVDEHLMKKVEAQEGSEKKQVIKTWSRRSTIFPNFIGHTFAVYDGRKHVPVYVTEDMVGHKLGEFAPTRTFKGHVADDKKTRR

SEQ ID NO: 5381 - DNA, 351 bp, Staphylococcus aureus
atgagtaataaagttcaacgttttatagaagcagaaagggagttaagtcagttaaagcactggttaaaaacaacacataagatttcaattgaagaatttgtagtcctttttaaagtgtatgaagctgaaaagattagcggtaaagaattgagggatacattacattttgaaatgctatgggatacaagtaaaatcgatgtgattatccgtaaaatctataaaaaagagcttatttctaaattgcgttctgaaacggatgaaagacaagtattctatttctatagtacttctcaaaagaaattgttagataaaattactaaagaaatagaagtgttaagcgttacaaactaa

SEQ ID NO: 5382 - protein, 116 aa, Staphylococcus aureus
MSNKVQRFIEAERELSQLKHWLKTTHKISIEEFVVLFKVYEAEKISGKELRDTLHFEMLWDTSKIDVIIRKIYKKELISKLRSETDERQVFYFYSTSQKKLLDKITKEIEVLSVTN

SEQ ID NO: 5383 - DNA, 447 bp, Staphylococcus aureus
atgaaacaatttgaaatcgtgacagaaccgatacaaacagaacaatatcgtgaattcactataaatgaatatcaaggtgcagtagttgtttttaccggtcatgttcgcgaatggactaaaggcgtcaaaacggaatatttagaatatgaagcgtatattccaatggctgaaaagaaattggcacaaattggagatgaaataaatgaaaaatggcctggaacgataacgagtattgttcatagaatagggccattacaaatttcagatatcgctgtattaattgcggtttcttcaccgcatcgtaaagatgcctatcgagcaaatgaatatgcaattgagcgtataaaagaaattgttccgatttggaaaaaagaaatttgggaagatggttcaaaatggcaagggcatcaaaaagggaattatgaagaagcgaagagggaggaataa

SEQ ID NO: 5384 - protein, 148 aa, Staphylococcus aureus
MKQFEIVTEPIQTEQYREFTINEYQGAVVVFTGHVREWTKGVKTEYLEYEAYIPMAEKKLAQIGDEINEKWPGTITSIVHRIGPLQISDIAVLIAVSSPHRKDAYRANEYAIERIKEIVPIWKKEIWEDGSKWQGHQKGNYEEAKREE

SEQ ID NO: 5385 - DNA, 303 bp, Staphylococcus aureus
ttgcattttacacaacgagagcaagacaaattaatgattgtagtggcggcggaagttgcacgtcgtcgtaaagcacgtggtttgaaactaaatcatcctgaggcattagctttaatcagcgatgaattattagaaggtgcacgcgatggtaagaccgttgcagagttaatgagttatggtagacaaattctaaacaaagaagatgtcatggatggtgtcgaacacatgattacagatatcgaaatcgaggctacgttccccgatggtactaagttaatcacagtacatcaccctattgtttaa

SEQ ID NO: 5386 - protein, 100 aa, Staphylococcus aureus
MHFTQREQDKLMIVVAAEVARRRKARGLKLNHPEALALISDELLEGARDGKTVAELMSYGRQILNKEDVMDGVEHMITDIEIEATFPDGTKLITVHHPIV

SEQ ID NO: 5387 - DNA, 693 bp, Staphylococcus aureus
atgaataaagctgaaaggcaaaatttaataattactgcaattcaacaaaataaaaaaatgaccgctttagaattagctaaatattgcaacgtatccaaacgcacaattttaagagatattgatgatttagaaaatcaaggtgttaaaatttatgcgcattatgggaaaaatggtggttaccaaatacaacaagcacaatctaaaattgcattaaacttatctgaaacacaattatcagccttatttttagtgcttaatgaaagtcagtcgtactcgacattaccatataaaagcgaaatcaacgcaattataaaacaatgtttaagtcttccacaaacacgcttaagaaaattgcttaaacgcatggacttttatattaaatttgatgacacacaacatatgacactcccaatgctgttttccgacattttaatttattgtacagaacgaaatgtgatgttagtagatcatagggttgatgataatattaaagctgaaaacgttatatttattggccttttgtgtaaacatggacattggcatgcagtcatttatgacattgctcaagacaaaactgccgaactcgaaattgaaaatattatagatatttcgtattcattcggtaagacgattcaaaccagagacatatccattgataactatcatcaatttttaaaccccatcgattcctaa

SEQ ID NO: 5388 - protein, 230 aa, Staphylococcus aureus
MNKAERQNLIITAIQQNKKMTALELAKYCNVSKRTILRDIDDLENQGVKIYAHYGKNGGYQIQQAQSKIALNLSETQLSALFLVLNESQSYSTLPYKSEINAIIKQCLSLPQTRLRKLLKRMDFYIKFDDTQHMTLPMLFSDILIYCTERNVMLVDHRVDDNIKAENVIFIGLLCKHGHWHAVIYDIAQDKTAELEIENIIDISYSFGKTIQTRDISIDNYHQFLNPIDS

SEQ ID NO: 5389 - DNA, 987 bp, Staphylococcus aureus
atgcaaaaagttgaaagtatcataattggtggagggccatgcggattaagtgcggctattgaacaaaaaagaaaaggtattgataccttaattattgaaaagggtaatgtcgttgaatcaatctacaattatcctactcaccaaacatttttctcatcaagtgataaattaagtattggggacgtaccgtttatcgttgaagaaagtaaaccaagacgtaatcaagcgctagtttattaccgagaagttgtaaaacatcatcaattaaaagtaaatgcatttgaagaagtattaactgttaaaaaaatgaataataaatttactattactacgacgaaagatgtttatgaatgtcgatttttaacaatcgcgacaggctattatggtcagcataatacattagaagttgaaagtgcggatttacctaaagtgttccattattttaaagaggcacatccgtattttgatcaagatgttgtaattatcggtggtaagaattcggctatcgatgctgctttggagttggaaaaagctggtgctaacgtgacggttctatatcgtggtggagattattcgccttcaattaaaccgtggatacttccaaatttcacagcattagtaaatcatgaaaaaattgacatggaatttaatgctaatgttacccaaataactgaagatactgtgacttatgaagtaaatggtgaaagtaaaacgatacacaatgattatgtatttgcgatgattggttatcatcccgattatgaatttttaaaatctgtaggcattcaaattaatacaaatgaatttggaacagcgcctatgtataataaagaaacatacgaaacaaatatcgaaaattgctatattgcaggtgtaattgctgcagggaacgatgcgaataccatttttattgaaaatggtaaattccacgggggcattattgctcaaagcatgctagctaagaaacaaacgcccttagaatcataa

SEQ ID NO: 5390 - protein, 328 aa, Staphylococcus aureus
MQKVESIIIGGGPCGLSAAIEQKRKGIDTLIIEKGNVVESIYNYPTHQTFFSSSDKLSIGDVPFIVEESKPRRNQALVYYREVVKHHQLKVNAFEEVLTVKKMNNKFTITTTKDVYECRFLTIATGYYGQHNTLEVESADLPKVFHYFKEAHPYFDQDVVIIGGKNSAIDAALELEKAGANVTVLYRGGDYSPSIKPWILPNFTALVNHEKIDMEFNANVTQITEDTVTYEVNGESKTIHNDYVFAMIGYHPDYEFLKSVGIQINTNEFGTAPMYNKETYETNIENCYIAGVIAAGNDANTIFIENGKFHGGIIAQSMLAKKQTPLES

SEQ ID NO: 5391 - DNA, 450 bp, Staphylococcus aureus
gtggaacgtacatttttaatgattaaaccagatgcagtacaaagaaatctaattggtgaagtaatttcaagaattgaaagaaaaggactaaaacttgtcggtggtaaattaatgcaagtaccaatggaacttgctgaaacacattatggtgaacaccaaggtaaaccattttataatgatttaatttcatttattacatcagcaccagtgttcgcaatggtagttgaaggtgaagatgcagttaatgtatctagacatattattggcagcaccaatccttcagaagcttcaccaggatcaattagaggtgatttaggtttaactgttggtagaaatatcattcacggttcagattcattagagtctgctgaacgtgaaattaatctatggtttaatgaaaatgaaattactagctatgcttcaccacgtgatgcatggttatatgaataa

SEQ ID NO: 5392 - protein, 149 aa, Staphylococcus aureus
MERTFLMIKPDAVQRNLIGEVISRIERKGLKLVGGKLMQVPMELAETHYGEHQGKPFYNDLISFITSAPVFAMVVEGEDAVNVSRHIIGSTNPSEASPGSIRGDLGLTVGRNIIHGSDSLESAEREINLWFNENEITSYASPRDAWLYE

SEQ ID NO: 5393 - DNA, 1107 bp, Staphylococcus aureus
atgaaagcagttcactttggtgctggtaacataggtcgtggtttcattggttatattcttgcagacaacaatgttaaagtaacatttgcagacgtcaatgaagaaatcattaatgctttagctcatgatcatcaatacgatgttattttagctgatgagtctaaaacaacgacgcgcgtgaataatgttgatgcaattaattcaatgcaaccttctgaagcgttgaaacaagcaattctagaagctgatattattacaacagctgttggtgttaacatactacctattattgctaaatcttttgcgcctttcttaaaagaaaaaacaaaccatgttaatattgttgcttgtgagaatgctattatggcaactgatacattgaaaaaagcagtacttgatattactggccctcttggtaacaatattcattttgctaactcagcagttgatagaattgtaccattacaaaagaatgaaaatatattagacgttatggttgagccattttacgaatgggttgttgaaaaagatgcatggtatggtccagaactaaaccatattaaatatgttgatgatttaacaccatatattgagcgtaaattattaactgtgaatacaggacatgcatatttagcgtatgctggtaaatttgcaggtaaagctacagttttagatgcagttgaagatagttcaattgaagctggcttacgccgtgttttagctgaaactagtcaatatattactaatgaatttgattttactgaagcggaacaagctgcttatgttgaaaaaataatagatcgtttcaacaattcttatttatctgatgaagtaacacgtgtcggacgaggtacattacgtaaaattggccctaaagatagaattataaaaccattaacatatctttataataaagatttagaacgcactggtttattaaatacagctgcattgttattgaagtatgatgatacagcagaccaagaaactgttgagaaaaataattacattaaagaacacggtttaaaagcgtttttaagtgaatatgctaaagttgacgatggcttagccgatgaaataattgaagcgtacaattcactttcataa

SEQ ID NO: 5394 - protein, 368 aa, Staphylococcus aureus [sequence omitted]

SEQ ID NO: 5395 - DNA, 435 bp, Staphylococcus aureus
atgagcgaattatttagtaatgacaatatctttttaaatgtaaatgttaacagccaaaatgaagcaattgaaaaagcaggtaaagccttagttgatagtggtgctgtaacagatgcttatattcaagcaatgaaagatcgtgagcaagtcgtatcaacatttatgggaaatggcttagcaattcctcatggcacagatgaagctaaaacaaatgtgattcactcaggtttaacattattacaaatccctgaaggcgttgactgggatggcgaagtagttaaagttgtcgtgggaattgctggtaaagatggcgaacatttagacttgttatctaaaattgcaattacatttagcgaagaagaaaatgtggatcgtatcgttcaagcaaaatctgcagaagaaattaaacaagtattcgaggaggcagatgcataa

SEQ ID NO: 5396 - protein, 144 aa, Staphylococcus aureus
MSELFSNDNIFLNVNVNSQNEAIEKAGKALVDSGAVTDAYIQAMKDREQVVSTFMGNGLAIPHGTDEAKTNVIHSGLTLLQIPEGVDWDGEVVKVVVGIAGKDGEHLDLLSKIAITFSEEENVDRIVQAKSAEEIKQVFEEADA

SEQ ID NO: 5397 - DNA, 402 bp, Staphylococcus aureus
atgaaaaaagtaaataacgacactgtatttggaattttgcaattagaaacacttttgggtgacattaactcaattttcagcgagattgaaagcgaatacaaaatgtctagagaagaaattttaattttactaactttatggcaaaaaggttctatgacgcttaaagaaatggacagatttgttgaagttaaaccgtataagcgtacgagaacgtataataatttagttgaattagaatggatttacaaagagcgtcctgttgacgatgaaagaacagttattattcatttcaatgaaaagttacaacaagagaaagtagagttgttgaatttcatcagtgatgcgattgcaagtagagcaacagcaatgcaaaatagtttaaacgcaattattgctgtgtaa

SEQ ID NO: 5398 - protein, 133 aa, Staphylococcus aureus
MKKVNNDTVFGILQLETLLGDINSIFSEIESEYKMSREEILILLTLWQKGSMTLKEMDRFVEVKPYKRTRTYNNLVELEWIYKERPVDDERTVIIHFNEKLQQEKVELLNFISDAIASRATAMQNSLNAIIAV

SEQ ID NO: 5399 - DNA, 2688 bp, Staphylococcus aureus
atgaacaaacatcacccaaaattaaggtctttctattctattagaaaatcaactctaggcgttgcatcggtcattgtcagtacactatttttaattacttctcaacatcaagcacaagcagcagaaaatacaaatacttcagataaaatctcggaaaatcaaaataataatgcaactacaactcagccacctaaggatacaaatcaaacacaacctgctacgcaaccagcaaacactgcgaaaaactatcctgcagcggatgaatcacttaaagatgcaattaaagatcctgcattagaaaataaagaacatgatataggtccaagagaacaagtcaatttccagttattagataaaaacaatgaaacgcagtactatcactttttcagcatcaaagatccagcagatgtgtattacactaaaaagaaagcagaagttgaattagacatcaatactgcttcaacatggaagaagtttgaagtctatgaaaacaatcaaaaattgccagtgagacttgtatcatatagtcctgtaccagaagaccatgcctatattcgattcccagtttcagatggcacacaagaattgaaaattgtttcttcgactcaaattgatgatggagaagaaacaaattatgattatactaaattagtatttgctaaacctatttataacgatccttcacttgtaaaatcagatacaaatgatgcagtagtaacgaatgatcaatcaagttcagtcgcaagtaatcaaacaaacacgaatacatctaatcaaaatacatcaacgatcaacaatgctaataatcaaccgcaggcaacgaccaatatgagtcaacctgcacaaccaaaatcgtcaacgaatgcagatcaagcgtcaagccaaccagctcatgaaacaaattctaatggtaatactaacgataaaacgaatgagtcaagtaatcagtcggatgttaatcaacagtatccaccagcagatgaatcactacaagatgcaattaaaaacccggctatcatcgataaagaacatacagctgataattggcgaccaattgattttcaaatgaaaaatgataaaggtgaaagacagttctatcattatgctagtactgttgaaccagcaactgtcatttttacaaaaacaggaccaataattgaattaggtttaaagacagcttcaacatggaagaaatttgaagtttatgaaggtgacaaaaagttaccagtcgaattagtatcatatgattctgataaagattatgcctatattcgtttcccagtatctaatggtacgagagaagttaaaattgtgtcatctattgaatatggtgagaacatccatgaagactatgattatacgctaatggtctttgcacagcctattactaataacccagacgactatgtggatgaagaaacatacaatttacaaaaattattagctccgtatcacaaagctaaaacgttagaaagacaagtttatgaattagaaaaattacaagagaaattgccagaaaaatataaggcggaatataaaaagaaattagatcaaactagagtagagttagctgatcaagttaaatcagcagtgacggaatttgaaaatgttacacctacaaatgatcaattaacagatttacaagaagcgcattttgttgtttttgaaagtgaagaaaatagtgagtcagttatggacggctttgttgaacatccattctatacagcaactttaaatggtcaaaaatatgtagtgatgaaaacaaaggatgacagttactggaaagatttaattgtagaaggtaaacgtgtcactactgtttctaaagatcctaaaaataattctagaacgctgattttcccatatatacctgacaaagcagtttacaatgcgattgttaaagtcgttgtggcaaacattggttatgaaggtcaatatcatgtcagaattataaatcaggatatcaatacaaaagatgatgatacatcacaaaataacacgagtgaaccgctaaatgtacaaacaggacaagaaggtaaggttgctgatacagatgtagctgaaaatagcagcactgcaacaaatcctaaagatgcgtctgataaagcagatgtgatagaaccagagtctgacgtggttaaagatgctgataataatattgataaagatgtgcaacatgatgttgatcatttatccgatatgtcggataataatcacttcgataaatatgatttaaaagaaatggatactcaaattgccaaagatactgatagaaatgtggataaagatgccgataatagcgttggtatgtcatctaatgtcgatactgataaagactctaataaaaataaagacaaagtcatacagctgaatcatattgccgataaaaataatcatactggaaaagcagcaaagcttgacgtagtgaaacaaaattataataatacagacaaagttactgacaaaaaaacaactgaacatctgccgagtgatattcataaaactgtagataaaacagtgaaaacaaaagaaaaagccggcacaccatcgaaagaaaacaaacttagtcaatctaaaatgctaccaaaaactggagaaacaacttcaagccaatcatggtggggcttatatgcgttattaggtatgttagctttattcattcctaaattcagaaaagaatctaaataa

SEQ ID NO: 5400 - protein, 895 aa, Staphylococcus aureus
MNKHHPKLRSFYSIRKSTLGVASVIVSTLFLITSQHQAQAAENTNTSDKISENQNNNATTTQPPKDTNQTQPATQPANTAKNYPAADESLKDAIKDPALENKEHDIGPREQVNFQLLDKNNETQYYHFFSIKDPADVYYTKKKAEVELDINTASTWKKFEVYENNQKLPVRLVSYSPVPEDHAYIRFPVSDGTQELKIVSSTQIDDGEETNYDYTKLVFAKPIYNDPSLVKSDTNDAVVTNDQSSSVASNQTNTNTSNQNTSTINNANNQPQATTNMSQPAQPKSSTNADQASSQPAHETNSNGNTNDKTNESSNQSDVNQQYPPADESLQDAIKNPAIIDKEHTADNWRPIDFQMKNDKGERQFYHYASTVEPATVIFTKTGPIIELGLKTASTWKKFEVYEGDKKLPVELVSYDSDKDYAYIRFPVSNGTREVKIVSSIEYGENIHEDYDYTLMVFAQPITNNPDDYVDEETYNLQKLLAPYHKAKTLERQVYELEKLQEKLPEKYKAEYKKKLDQTRVELADQVKSAVTEFENVTPTNDQLTDLQEAHFVVFESEENSESVMDGFVEHPFYTATLNGQKYVVMKTKDDSYWKDLIVEGKRVTTVSKDPKNNSRTLIFPYIPDKAVYNAIVKVVVANIGYEGQYHVRIINQDINTKDDDTSQNNTSEPLNVQTGQEGKVADTDVAENSSTATNPKDASDKADVIEPESDVVKDADNNIDKDVQHDVDHLSDMSDNNHFDKYDLKEMDTQIAKDTDRNVDKDADNSVGMSSNVDTDKDSNKNKDKVIQLNHIADKNNHTGKAAKLDVVKQNYNNTDKVTDKKTTEHLPSDIHKTVDKTVKTKEKAGTPSKENKLSQSKMLPKTGETTSSQSWWGLYALLGMLALFIPKFRKESK

SEQ ID NO: 5401 - DNA, 906 bp, Staphylococcus aureus
atgacgaatcaagacaacaatcatcaattgaatcatcgtatatatcattttgaaaagatatataaagctatcaaacatgtcattgtttttatatttatgattttcattgccatcgttgctatcgctgtgattgcgatgtctttatattttcatcatttaactaaaacgtccgactcattatcagatgatgctttaataaaaaaagttcgacaaatacctggcgatgaattattagatcataataacaaaaatttattatatgagtataaccattctcaaaactcactcattataggccctaaaacatcaagtccaaatgtcattaaagcattaacgtcatctgaagacactttattttataaacatgatggcatcttaccaaaggcgattttaagagcaatgatacaagatatttttaatactgatcaaagttcaggtggtagcacaattacacaacaacttgttaaaaatcaagttcttaccaacgaaaaaacatatagtagaaaagcaaatgaacttcgcctagcaattagattagaacacctactctcaaaagatgaaattatatatacatatttaaatatagttcccttcggtagagattataatggcgctaatatttccggaattgcatccgcttcatatagtctatttggtattccaccaaaagatttatcaattgcacaatctgcataccttatcggtttgttgcaaagcccatatggctatacaccctacgaaaaagatggaacgttaaaatcggataaagatttgaaatatagtattcaaagacaacattatgtattaaagcgtatgttaatcgaagatcaaatcactgaaaaagaatacaacgacgcattaaaatatgatattaaatcacatttgttaaatcgaaaaaagcgttaa

SEQ ID NO: 5402 - protein, 301 aa, Staphylococcus aureus
MTNQDNNHQLNHRIYHFEKIYKAIKHVIVFIFMIFIAIVAIAVIAMSLYFHHLTKTSDSLSDDALIKKVRQIPGDELLDHNNKNLLYEYNHSQNSLIIGPKTSSPNVIKALTSSEDTLFYKHDGILPKAILRAMIQDIFNTDQSSGGSTITQQLVKNQVLTNEKTYSRKANELRLAIRLEHLLSKDEIIYTYLNIVPFGRDYNGANISGIASASYSLFGIPPKDLSIAQSAYLIGLLQSPYGYTPYEKDGTLKSDKDLKYSIQRQHYVLKRMLIEDQITEKEYNDALKYDIKSHLLNRKKR

SEQ ID NO: 5403 - DNA, 351 bp, Staphylococcus aureus
atgaaaattagaaaatctatacttgcgggaactttagcaatcgttttagcatcaccactagtaactaatctagataaaaatgaggcacaagctagcacaagcttgccaacatcgaatgaatatcaaaacgaaaagttagctaatgaattaaaatcgttattagatgaactaaatgttaatgaattagctactggaagtttaaacacttattataagcgaactataaaaatttcaggtcaaaaagcaatgtatgctcttaagtcaaaagactttaagaaaatgtcagaagcaaaatatcaacttcaaaagatttataatgaaattgacgaagcactaaaaagtaaatattaa

SEQ ID NO: 5404 - protein, 116 aa, Staphylococcus aureus
MKIRKSILAGTLAIVLASPLVTNLDKNEAQASTSLPTSNEYQNEKLANELKSLLDELNVNELATGSLNTYYKRTIKISGQKAMYALKSKDFKKMSEAKYQLQKIYNEIDEALKSKY

SEQ ID NO: 5405 - DNA, 1380 bp, Staphylococcus aureus
atgaatatcattgagcaaaaattttatgacagtaaagcttttttcaatacacaacaaactaaagatattagttttagaaaagagcaattaaagaagttaagcaaagctattaaatcatacgagagcgatattttagaagcactatatacagatttaggaaaaaataaagtcgaagcttatgctactgaaattggcataactttgaaaagtatcaaaattgcccgtaaggaacttaaaaactggactaaaacaaaaaatgtagacacacctttatatttatttccaacaaaaagctatatcaaaaaagaaccttatggaacagttttgatcattgcaccatttaactatccttttcaactagtgttcgaacctttaatcggtgctattgcagcaggtaatacggcaattattaaaccatctgagttgacgcctaatgttgcacgagtgattaaacggttaatcaatgaaacatttgatgcaaattacattgaagttattgagggaggaattgaagaaacgcaaacgttaattcacttaccttttgactatgtcttctttacaggaagtgaaaatgtaggcaaaatcgtttatcaagctgccagcgaaaatttagttcctgtgacattagaaatgggcggtaaatctccagtcatcgttgatgaaacagcgaatattaaagttgctagtgagcgcatttgttttgggaaattcactaatgccggccaaacatgtgttgcaccagattacattttagtacacgaatctgtaaaagatgatttaatcacagccctatcaaaaacgttgcgtgaattttatggtcaaaatatacaacaaagtccagattatggccgcattgtaaaccttaaacattatcatcgtctgacttcattacttaacagtgcacaaatgaatattgtatttggtggtcatagtgatgaggatgaacgttatatagaaccaacattgttagatcacgttacaagtgattcagcaattatgcaagaagaaatttttggtcctatcttaccgattttaacgtatcagtcattggatgaagcaatagcctttattcaccaaagaccaaaacctttgagtttatatttatttagcgaagatgaaaatgctacacaacgtgtaataaacgagctatcatttggcggcggcgctattaatgatacattgatgcacctagcgaatcctaaattaccatttggtggtgttggcgcctcaggtataggacgctatcatggtaaatattcattcgacacttttacacatgaaaaaagctacattttcaaatctacacgattagaatcaggtgtccatttaccaccatataaaggtaaatttaaatacatcaaagctttctttaaaaattaa

SEQ ID NO: 5406 - protein, 459 aa, Staphylococcus aureus
MNIIEQKFYDSKAFFNTQQTKDISFRKEQLKKLSKAIKSYESDILEALYTDLGKNKVEAYATEIGITLKSIKIARKELKNWTKTKNVDTPLYLFPTKSYIKKEPYGTVLIIAPFNYPFQLVFEPLIGAIAAGNTAIIKPSELTPNVARVIKRLINETFDANYIEVIEGGIEETQTLIHLPFDYVFFTGSENVGKIVYQAASENLVPVTLEMGGKSPVIVDETANIKVASERICFGKFTNAGQTCVAPDYILVHESVKDDLITALSKTLREFYGQNIQQSPDYGRIVNLKHYHRLTSLLNSAQMNIVFGGHSDEDERYIEPTLLDHVTSDSAIMQEEIFGPILPILTYQSLDEAIAFIHQRPKPLSLYLFSEDENATQRVINELSFGGGAINDTLMHLANPKLPFGGVGASGIGRYHGKYSFDTFTHEKSYIFKSTRLESGVHLPPYKGKFKYIKAFFKN

SEQ ID NO: 5407 - DNA, 174 bp, Staphylococcus aureus
atgaaattcaaagtaaatgagaatgaaacaattgctgattgtttgtcacgaatgaaaatgcaagggtatatgccggtaaaacgtattgaaaaacccgtgtttcaagagcaaaaagatggcacggttgaagtatcacatcaagaaatcgtttttgtaggtaagaaaatccaataa

SEQ ID NO: 5408 - protein, 57 aa, Staphylococcus aureus
MKFKVNENETIADCLSRMKMQGYMPVKRIEKPVFQEQKDGTVEVSHQEIVFVGKKIQ

SEQ ID NO: 5409 - DNA, 327 bp, Staphylococcus aureus
atggaacaaattgaattatttagtattgataaattcaaatgtaattcagaggctaagtattatcttaatattattgagggagaatggcatcctcaagatttaaatgatagtcctttaaaatttattctcagtacctcagacgattctgattacatttgcaaatatataaatacagaacacaaacaactcacattatataataaaaataatagctcaattgttattgaaatatttataccaaatgataataaaatactactaacaattatgaacacagaagctttgggaacttctcctagaatgactttcattaagcataagtcataa

SEQ ID NO: 5410 - protein, 108 aa, Staphylococcus aureus
MEQIELFSIDKFKCNSEAKYYLNIIEGEWHPQDLNDSPLKFILSTSDDSDYICKYINTEHKQLTLYNKNNSSIVIEIFIPNDNKILLTIMNTEALGTSPRMTFIKHKS

SEQ ID NO: 5411 - DNA, 471 bp, Staphylococcus aureus
atgcctcgtaaaggatcagtacctaaaagagacgtattaccagatccaattcataactctaagttagtaactaaattaattaacaaaattatgttagatggtaaacgtggaacagcacaaagaattctttattcagcattcgacctagttgaacaacgcagtggtcgtgatgcattagaagtattcgaagaagcaatcaacaacattatgccagtattagaagttaaagctcgtcgcgtaggtggttctaactatcaagtaccagtagaagttcgtccagagcgtcgtactactttaggtttacgttggttagttaactatgcacgtcttcgtggtgaaaaaacgatggaagatcgtttagctaacgaaattttagatgcagcaaataatacaggtggtgccgttaagaaacgtgaggacactcacaaaatggctgaagcaaacaaagcatttgctcactaccgttggtaa

SEQ ID NO: 5412 - protein, 156 aa, Staphylococcus aureus
MPRKGSVPKRDVLPDPIHNSKLVTKLINKIMLDGKRGTAQRILYSAFDLVEQRSGRDALEVFEEAINNIMPVLEVKARRVGGSNYQVPVEVRPERRTTLGLRWLVNYARLRGEKTMEDRLANEILDAANNTGGAVKKREDTHKMAEANKAFAHYRW

SEQ ID NO: 5413 - DNA, 186 bp, Staphylococcus aureus
atgagttcttataaagaaattgaacacttacacatcaatactggtggtaaagagcttactcaagaacaaatagaagaagccaaagcttttatagacagtcaagaatttaaagatatgattcgagaagctaaagagtcacgtcaaagagttatggagtctaaaattaccgatagaactaaaatgtga

SEQ ID NO: 5414 - protein, 61 aa, Staphylococcus aureus
MSSYKEIEHLHINTGGKELTQEQIEEAKAFIDSQEFKDMIREAKESRQRVMESKITDRTKM

SEQ ID NO: 5415 - DNA, 1308 bp, Staphylococcus aureus
atgaacaaagtccacaaacctttatatttttatttaatgcttttcttctctacaactatcataggtgcacttttattgtatttaccttttactggtaaaaagccaatatcttttttagatgccctatttatagcttcaagtgcatttacagttactggcttgtccccagttgatataggatcacagtttaatatacttggtgagatagtaatactattattaattcaaataggtggtctgggtatcgtgaccgtaaccctattgacactagtatttttaaatagaaagatatcaatgaaaaatagattcttgattatggttacatggaatattgacgaacctggtggtgttattaagctaattaaacacttggctatttatagtttagtcactgaattaattggtatgatttgtttgtgtttatcttttataccaaaatttggtataggcaaaggtttatttttaagcttattcacatcagtatcagcttttaataatgctggatttgccctttttaagaataacttaatagattattctagtgatccaattgtcattattacaatctcaatactcataatatttggaggtattggacattttgtcgtgatagactttattaattgtaaaaaattgagtaaattatctttacattctaaattagtcttaactacaactagtatcctaataattataggagctattacattctttttattagaacagtttaatactatgcaacatatgggactagttgaaaaaatcggaaattcttttttccaatcagtaacaacacgaacagcgggttttaacagtatagatatagcaagcattaacaaatctaccgcattaatgttaatgctacttatgtttattggtggtgcccctctcagtgcagctggaggaattaaaataactacttttgcagttgcgtttatttttgtactaaattatatacgtaaagaaaataatgtttcagtattcaataaagaaatatctgacaaacatataaaactatctattgttaccattaatatctcatttctatttatcagcatcattacttttatattatcgataattaatccgaacatatcattaatcaagttattattcgaagtggtttctgcattcggaacagtagggttaagtatgaaccttaccacagaatatcatggtattactaaaataattattatattcgttatgctttgcggtaaagtaggactattaactttattaagaacatttataccaccaaaaagtcctaaaaattaccgctacactaaaggacaaatttatctataa

SEQ ID NO: 5416 - protein, 435 aa, Staphylococcus aureus
MNKVHKPLYFYLMLFFSTTIIGALLLYLPFTGKKPISFLDALFIASSAFTVTGLSPVDIGSQFNILGEIVILLLIQIGGLGIVTVTLLTLVFLNRKISMKNRFLIMVTWNIDEPGGVIKLIKHLAIYSLVTELIGMICLCLSFIPKFGIGKGLFLSLFTSVSAFNNAGFALFKNNLIDYSSDPIVIITISILIIFGGIGHFVVIDFINCKKLSKLSLHSKLVLTTTSILIIIGAITFFLLEQFNTMQHMGLVEKIGNSFFQSVTTRTAGFNSIDIASINKSTALMLMLLMFIGGAPLSAAGGIKITTFAVAFIFVLNYIRKENNVSVFNKEISDKHIKLSIVTINISFLFISIITFILSIINPNISLIKLLFEVVSAFGTVGLSMNLTTEYHGITKIIIIFVMLCGKVGLLTLLRTFIPPKSPKNYRYTKGQIYL

SEQ ID NO: 5417 - DNA, 1329 bp, Staphylococcus aureus
atgttgagtaggaagtataaaatagatttaaaagcaattaatcaaaatactgagtctacaagtgctatttcgaaagcgtcatacgaagttgagaatgctaataataatggtctatcaaaaagagacgtgattaatcaatttaatgatttgaaaaaaatgaaaaaattcccttctaatcttgaatatgttgatagttacactgattctcttactggagtaacaacttctgcttttttaaataaagatacaggcaaagtaactctcgggatgactgggactaatttacaagacgaagcctttaaaaagttaaaagaaggtgaattttcaagacaaaatgttaccaatgctttggaaacagttaaagatggatatgcagatcttaaaatattatattctcctgcatctgatcaaaactatagatatgcgaatacacaagaatttataaataaaataaaaagtaagtatgacattgattttattactggacattcactaggtggaagagatgcggtagttctaggaatgagtaatggtattccgaacattgtggtttataatccagctcctatttctataactagtttgaatcctaattccccagatggaaaacgtttattagaattatataaaaattataaaggtaatattactaggtttgttgcagaaaatgatgcattgacagaaaatctgaagaaatataagcattatgtttttttcggtaatgataaagtctttaaaaatggtaaaggtcatgaaatggaaggctttctgaccgaagaagaacaaaaagctataaaaaaagaacttaaaaaactacaaggttatgcagaagaaaataataagtcatttgtaaagaattcaaataatgctatctctaaattagctagtatagaattacttagagcaaatatgatgactacaaatggaggaggattatcttcttcgcagcaaaaagttttagaaagtttaacagctttaacaattgcgcagtcattcagtcaactgatagacgatgaaattaatcaaatcaaaaaaatgtataatgaaaagaaaaagaaatttggaaaaaattgggaagacgctcaaaaagctggaaaagctgtaggtgaagatttgagtgtaaatggagttctcaatgctttagatgaaggtcaagtgaatgaaagtagtatggtaagagaacctgaacaaatgatatctgcaaaagaaagacaactttcaacgatagggtcttctgtatcaaattatattatgagagttagactcagtattaatgaaatcgttgataaagatcaagtgcttgcatcacaaataggtggattactatga

SEQ ID NO: 5418 - protein, 442 aa, Staphylococcus aureus
MLSRKYKIDLKAINQNTESTSAISKASYEVENANNNGLSKRDVINQFNDLKKMKKFPSNLEYVDSYTDSLTGVTTSAFLNKDTGKVTLGMTGTNLQDEAFKKLKEGEFSRQNVTNALETVKDGYADLKILYSPASDQNYRYANTQEFINKIKSKYDIDFITGHSLGGRDAVVLGMSNGIPNIVVYNPAPISITSLNPNSPDGKRLLELYKNYKGNITRFVAENDALTENLKKYKHYVFFGNDKVFKNGKGHEMEGFLTEEEQKAIKKELKKLQGYAEENNKSFVKNSNNAISKLASIELLRANMMTTNGGGLSSSQQKVLESLTALTIAQSFSQLIDDEINQIKKMYNEKKKKFGKNWEDAQKAGKAVGEDLSVNGVLNALDEGQVNESSMVREPEQMISAKERQLSTIGSSVSNYIMRVRLSINEIVDKDQVLASQIGGLL

SEQ ID NO: 5419 - DNA, 315 bp, Staphylococcus aureus
atgactctaatagaaccagatatgaccttaagaatgccagatataagtactacagtagaaacacttaatctcatatctaaaatggaagcgcaaaaagaaaatattcgcacagttattgcacctgaacataagcataaatacaaagatattgaaaacggattaaaaggtgaagaaaaagtattaattgaacaaatggcgcaacattgcgaagcttttaaagctaattttaaaggtgcagctcaaggagattgggttaaaagtgccatgtctgagatagacagcattaaggatgacctgaaaaaaattaatagctaa

SEQ ID NO: 5420 - protein, 104 aa, Staphylococcus aureus
MTLIEPDMTLRMPDISTTVETLNLISKMEAQKENIRTVIAPEHKHKYKDIENGLKGEEKVLIEQMAQHCEAFKANFKGAAQGDWVKSAMSEIDSIKDDLKKINS

SEQ ID NO: 5421 - DNA, 660 bp, Staphylococcus aureus
atgtttggttctgatttagacagtgcacagttattacaagcattgtacgaaacgctatatatggtatctattgctttatttttaggagcagtgattggtattccattaggtgtcttattggtaattactcgaaaacaaggcatatggcccaatatagtgatacatcaagttttaaatcctttaatcaatattttaaggtcactaccatttattattttgttaattgcgattgtgccattcacaaaattagtagtaggtacttcaattggtacgactgctgccatcgtgcctttaacagtatatgtggcaccttacattgcaagacttgttgaaaactcattattggaagtagacgaggggattattgaagcggcgaaagcgatgggcgcttcaccactacaaatcattagatattttttaattcctgaagctttaggttcgttagtattagcaattaccactgcgattattggacttattggaagtacggcgatggcaggagctgttggcggtggtggtataggagacttagctttagtgtatggttatcaaagatttgatacgacggtcattattattaccgttattgtattagtcattattgtccaagtgattcaaacgctagggaatgttctagctagattcatacgtagacattaa

SEQ ID NO: 5422 - protein, 219 aa, Staphylococcus aureus
MFGSDLDSAQLLQALYETLYMVSIALFLGAVIGIPLGVLLVITRKQGIWPNIVIHQVLNPLINILRSLPFIILLIAIVPFTKLVVGTSIGTTAAIVPLTVYVAPYIARLVENSLLEVDEGIIEAAKAMGASPLQIIRYFLIPEALGSLVLAITTAIIGLIGSTAMAGAVGGGGIGDLALVYGYQRFDTTVIIITVIVLVIIVQVIQTLGNVLARFIRRH

SEQ ID NO: 5423 - DNA, 270 bp, Staphylococcus aureus
atggcaaaacgttccaaatcacaacgtttatcaagtttactaaatgtcgcaggtttcatagtcgacggctacaatggctataaatatcatgctaaaaataaaaaattagtatatctttcattaggtttaagcactgtaggaaccgtgttagacttttacatttcaattaagtcaccacgtaagttcaaaaaagcagtggcagttgttactttaataacaaacggtgctagattatttacaagcattcgcaaagtaaaacatgaatactaa

SEQ ID NO: 5424 - protein, 89 aa, Staphylococcus aureus
MAKRSKSQRLSSLLNVAGFIVDGYNGYKYHAKNKKLVYLSLGLSTVGTVLDFYISIKSPRKFKKAVAVVTLITNGARLFTSIRKVKHEY

SEQ ID NO: 5425 - DNA, 219 bp, Staphylococcus aureus
atgagtgaatggcatattaataatcaatctacaaaaccttttttaatacaacaagcggaaaagcaattgtctattgttaaaccgttgcctaatggtagcttccaaatactcacagaaataaatttggagaatggcaatattagtaacatcgatcattctttacttgtttcagtagaccccaaagcattagaaataagtatatttgacgctgtaaattaa

SEQ ID NO: 5426 - protein, 72 aa, Staphylococcus aureus
MSEWHINNQSTKPFLIQQAEKQLSIVKPLPNGSFQILTEINLENGNISNIDHSLLVSVDPKALEISIFDAVN

SEQ ID NO: 5427 - DNA, 285 bp, Staphylococcus aureus
ttgaatgaactaactaaagaacaaaagtatacaatagctaaattttacaaattatatattgaacgttcgaataaaggagaaacagaaacagtcgctaacttttttggcgatgctaaagatgcacgtgaaaactatttttgcgatcgtgattatcaagacttcttaactaactgccaaattttaattcaaaacaaatacttaactggtgaagttttggacgataacatttacaatatttctattttaaacaagacatttattgaattcgaacaaaattttggttga

SEQ ID NO: 5428 - protein, 94 aa, Staphylococcus aureus
MNELTKEQKYTIAKFYKLYIERSNKGETETVANFFGDAKDARENYFCDRDYQDFLTNCQILIQNKYLTGEVLDDNIYNISILNKTFIEFEQNFG

SEQ ID NO: 5429 - DNA, 603 bp, Staphylococcus aureus
atgacatctttaattattgcagaagatcaaaatatgttacgacaggcaatggttcaattaattaaactacatggtgattttgaaattttagcagatactgataatggtctcgatgcaatgaaacttattgaagaatataatcctaacgttgttattttagatatagaaatgccaggcatgactggacttgaagttttagcggaaattagaaaaaagcatttgaatattaaagtgattattgtaacaacttttaaaagaccgggatactttgaaaaagcagttgtgaatgatgtggatgcatatgttttaaaagaacgttctatagaagaattggtggaaaccattaataaagtaaataacggagagaaagaatatagcgccacattgatgacttcattttttgtagataaaaacccattaacgcccaaagaacaaattgtattaagggaaattggcaatggtttaagtagtaaagaaataagtgaaaaattatttttgacagatggaacagttagaaattatacatctgttataattgataaattatttgcagataatcgttttgatgcttggaaaaaggcaaatgaaaaaggctggatctaa

SEQ ID NO: 5430 - protein, 200 aa, Staphylococcus aureus
MTSLIIAEDQNMLRQAMVQLIKLHGDFEILADTDNGLDAMKLIEEYNPNVVILDIEMPGMTGLEVLAEIRKKHLNIKVIIVTTFKRPGYFEKAVVNDVDAYVLKERSIEELVETINKVNNGEKEYSATLMTSFFVDKNPLTPKEQIVLREIGNGLSSKEISEKLFLTDGTVRNYTSVIIDKLFADNRFDAWKKANEKGWI

SEQ ID NO: 5431 - DNA, 252 bp, Staphylococcus aureus
atgcttacattaataaaattgaaagaagatgaacaggttataatatatgaatatatacctgaagatgatataagtaacggtaaaggttcagtaacttttaataaaaaagatgcagaggttatagatttctcattatctgaaatagaaaatgaagaatattttatgttatatcgtaataagtctttttctgtagtaagagactttatcgagaagcaagaatttcccgaaaattataaaatagcatggtattaa

SEQ ID NO: 5432 - protein, 83 aa, Staphylococcus aureus
MLTLIKLKEDEQVIIYEYIPEDDISNGKGSVTFNKKDAEVIDFSLSEIENEEYFMLYRNKSFSVVRDFIEKQEFPENYKIAWY

SEQ ID NO: 5433 - DNA, 612 bp, Staphylococcus aureus
atgttcaaaaaatatgactcaaaaaattcaatcgtattaaaatctattctatcgctaggtaccatctatgggggaacatttggaatatatccaaaagcagacgcgtcaacacaaaattcctcaagtgtacaagataaacaattacaaaaagttgaagaagtaccaaataattcagaaaaagctttggttaaaaaactttacgatagatacagcaaggatacaataaatggaaaatctaataaatctaggaattgggtttattcagagagacctttaaatgaaaaccaagttcgtatacatttagaaggaacatacacagttgctggcagagtgtatacacctaagaggaatattactcttaataaagaagttgtcactttaaaagaattggatcatatcataagatttgctcatatttcctatggcttgtatatgggagaacatttgcctaaaggtaacatcgtcataaatacaaaagatggtggtaaatatacattagagtcgcataaagagctacaaaaagatagggaaaatgtaaaaattaatacagccgatataaaaaatgtaactttcaaacttgtgaaaagtgttaatgacattgaacaagtttga

SEQ ID NO: 5434 - protein, 203 aa, Staphylococcus aureus
MFKKYDSKNSIVLKSILSLGTIYGGTFGIYPKADASTQNSSSVQDKQLQKVEEVPNNSEKALVKKLYDRYSKDTINGKSNKSRNWVYSERPLNENQVRIHLEGTYTVAGRVYTPKRNITLNKEVVTLKELDHIIRFAHISYGLYMGEHLPKGNIVINTKDGGKYTLESHKELQKDRENVKINTADIKNVTFKLVKSVNDIEQV

SEQ ID NO: 5435 - DNA, 387 bp, Staphylococcus aureus
atgatgaaagttcgaattacttttattattttagcaattttatcgacgattgtttgcttgttcttagcagcaatgcatccaacaggaccaaacacagtaacttttgaacagccatatttattcaccctcaacatcattataatggtattagtcgcattaccttcacttgttttagctatatatgattatatgagttttagaatttcttctgctattttacaatttctaggggctatctcttggttctttttatcattgatattatcgctcacacaatttacaccttttacattagcgtcatttataacttcaattattttgttcacaagcacaattatcacattagccattggtggtaagtctgttgaaaagaatgattccccttaa

SEQ ID NO: 5436 - protein, 128 aa, Staphylococcus aureus
MMKVRITFIILAILSTIVCLFLAAMHPTGPNTVTFEQPYLFTLNIIIMVLVALPSLVLAIYDYMSFRISSAILQFLGAISWFFLSLILSLTQFTPFTLASFITSIILFTSTIITLAIGGKSVEKNDSP

SEQ ID NO: 5437 - DNA, 360 bp, Staphylococcus aureus
gtgaatatcatctcaacaattttaatcatatttgtggcattagagtttttctatattatgtaccttgaaacgattgctacaacttccaaaaagactagcgagacatttaatataagcgtcgataaattgaaagacaaaaatattaacctacttttgaagaaccaaggcgtatataacggtttaatcggagttttgctaatatacggtttgtttatcagcagtaatccaaaagaaatatgcgcagctattttagtgtatatcattggcgttgctatttatggtggcctttcaagcaatattagtatctttttcaaacaaggcacattgccagtattggcactcatatcaatgctttggtaa

SEQ ID NO: 5438 - protein, 119 aa, Staphylococcus aureus
MNIISTILIIFVALEFFYIMYLETIATTSKKTSETFNISVDKLKDKNINLLLKNQGVYNGLIGVLLIYGLFISSNPKEICAAILVYIIGVAIYGGLSSNISIFFKQGTLPVLALISMLW

SEQ ID NO: 5439 - DNA, 699 bp, Staphylococcus aureus
atgaaattaacaacgatagctaaagcaacattagcattaggaatattaactacaggtgtgtttacagcagaaagtcaaactggtcacgcgaaagtagaacttgatgagacacaacgcaaatattatatcaatatgctacatcaatactattctgaagaaagttttgaaccaacaaacattagtgttaaaagcgaagattactatggctctaacgttttaaactttaaacaacgaaataaagcttttaaagtatttttacttggtgacgataaaaataaatataaagaaaaaacacatggccttgatgtctttgcagtacctgaattaatagatataaaaggtggcatatatagcgttggcggtataacaaagaaaaatgtgagatcagtgtttggatttgtaagtaatccaagtctacaagttaaaaaagttgatgctaaaaatggcttttcgataaacgagttgttttttattcaaaaggaagaagtatcattgaaggaactggactttaaaataagaaaactcttaatcgaaaaatatagattgtataaaggaacgtctgataaaggtagaattgttatcaatatgaaagacgaaaagaagcatgaaattgatttaagtgaaaaattaagttttgaacgtatgtttgatgtaatggatagtaagcaaattaaaaatattgaagtgaatttgaattag

SEQ ID NO: 5440 - protein, 232 aa, Staphylococcus aureus
MKLTTIAKATLALGILTTGVFTAESQTGHAKVELDETQRKYYINMLHQYYSEESFEPTNISVKSEDYYGSNVLNFKQRNKAFKVFLLGDDKNKYKEKTHGLDVFAVPELIDIKGGIYSVGGITKKNVRSVFGFVSNPSLQVKKVDAKNGFSINELFFIQKEEVSLKELDFKIRKLLIEKYRLYKGTSDKGRIVINMKDEKKHEIDLSEKLSFERMFDVMDSKQIKNIEVNLN

SEQ ID NO: 5441 - DNA, 558 bp, Staphylococcus aureus
atgtttttatgtaaaagacaaattgatatcaatgcacgatttggtttgcctagaattgcatttatgagtgcagttgcaaccatcattatgtttttagttagttatgaagtaatgtattttttatctaatacgccattatcagatagacattttctcatctttttattacttgtatttatgacgtatccattacataaaagtatacatttattatttttcttaccatatagaaaatcgtttaaagttcataagttaactaaaagaaaatggcttatattctataatacctacgtcaatcaacctgtacacaaattttatttttgcattaacttaatattgccgttaattatcttatctgcaatgttcgtttatctaacaatttcattcccgcaatatggacattattttatgttcttattggcattgaatttcggtatttccattacagatttattatatttaaaaataattatattttctaattatggacaatatatagaagaacatagtacaggtattaatattttgaaaaaaattaaaaatccatatcatttataa

SEQ ID NO: 5442 - protein, 185 aa, Staphylococcus aureus
MFLCKRQIDINARFGLPRIAFMSAVATIIMFLVSYEVMYFLSNTPLSDRHFLIFLLLVFMTYPLHKSIHLLFFLPYRKSFKVHKLTKRKWLIFYNTYVNQPVHKFYFCINLILPLIILSAMFVYLTISFPQYGHYFMFLLALNFGISITDLLYLKIIIFSNYGQYIEEHSTGINILKKIKNPYHL

SEQ ID NO: 5443 - DNA, 489 bp, Staphylococcus aureus
atgaaaaaagtaaacaaagagtacttattgaactttataattgtaacgttcttactcggaataataatcatacctatatccgtattagtattctcaataccattttttagcataataggtttccaatcattagcagataatttaaatataagttctttaataacaataaattggtattcaaataatatgttttataacattggctatattgcattattctttatagtaacttatctaatatttatttttcttgaactttttataatatttttacatataaaatacaaaaagaaatttaataatattatcttattcatattctttataactgctaatatgatcgtattaaacttaataattttgaagattttctacaacattcatataaatttatattttcaaattttcatttattctttatgcttctatcttttatttactcataaagagatttacaaaatatttgaagaaaataaaagtaaaaaataa

SEQ ID NO: 5444 - protein, 162 aa, Staphylococcus aureus
MKKVNKEYLLNFIIVTFLLGIIIIPISVLVFSIPFFSIIGFQSLADNLNISSLITINWYSNNMFYNIGYIALFFIVTYLIFIFLELFIIFLHIKYKKKFNNIILFIFFITANMIVLNLIILKIFYNIHINLYFQIFIYSLCFYLLFTHKEIYKIFEENKSKK

SEQ ID NO: 5445 - DNA, 609 bp, Staphylococcus aureus
atgaagaatttaaaaagtttttttattaaaaatactttggtactaacatctactgcattattattttctagttttgaacctgtagttcatgctgcagaaaataaggaagttgttaaaacagtagaaaatgataatgtagaattcaatgaattgttagaaggacaagaatatatttgggaagttttatctagagatgatgaaggatttaaaatgtttctagatgagcaaagagcttttaatcctaattttgataatgatgttttactagcaaaacaagaaggtgctttaaattcttcagtatttgctaataattctatgactttaaactcaaataagcctactcctagaggtcctatcggtgcaactttaaaagctattaaggctctatcaccttctttgagacatggtggaactgctatatcttggatcattaaaccattaagtagaaaacatgctgttctagtaaaaaaatattcaagaaagatgtctaatgcaattgataggttagataagtctacgaaatcagctgttgaaaatgcttttgttaaagcaggtataccaagaagtgatgcgaaaactttaacttatattgtatttttagttatttag

SEQ ID NO: 5446 - protein, 202 aa, Staphylococcus aureus
MKNLKSFFIKNTLVLTSTALLFSSFEPVVHAAENKEVVKTVENDNVEFNELLEGQEYIWEVLSRDDEGFKMFLDEQRAFNPNFDNDVLLAKQEGALNSSVFANNSMTLNSNKPTPRGPIGATLKAIKALSPSLRHGGTAISWIIKPLSRKHAVLVKKYSRKMSNAIDRLDKSTKSAVENAFVKAGIPRSDAKTLTYIVFLVI

SEQ ID NO: 5447 - DNA, 1524 bp, Staphylococcus aureus
atgaagagtaaaaaaagaatggaaagattgtacgatgatttatttagtactaattttttaattaattatggttattttgatattactcctaaaaataatcaagatttaacagaattaaacagctacggtaaatcagatgcattttatttgaaaatatttaatatgagtaaattagctgaatatattacttataatccattttacattaaaaaattttttaatgatagaaacatacgtagtactgaaccaataatatttactattccgaaaaataatacatcaagaagagaatataagattcctaatatttatagctatttaaatttgatgtttttcatgcaagaaaataaaaaagaatttaaagaagtttttctaaccaataaattttcaacatctaaatttttttcacttccagattttgattttaaatttactgacaatttaaaaaagactttactttacggtggtaatcatatattaaacgttgatttatctaatttttatcattctctttatacacatagcataccttgggtaataatgggaaagaagaatgctaaaaaagaaagaaagaaaggtttttcaaatcaattagataaattaattacatcctgtcaatataatcaaactcatggaatacctactggcaacatattaagtcgtattattagtgaattatatatgtgttatattgattctgaaatggaaaataaagggtatagatatgcgagatatgtggatgacatatcattctcatttaattttgaagaagagaaagataaattttacagagattttaacaaactatgtatgaaatatgaattaaaaattaatgacaagaaaactgaagtaaatgattttccatatatacatccacaaaacaaagactttatatttaattatttcaaaaattattcctcaaatagtaaagatgaaacttggattataggtattaagaactttattgatttatgtatagatgaagaaagaaaaggaaataaaggggcaataaaaagtattttcccagtaatagaaaatactttaaagaagaaaaaaataaataaacatcaaataagtaagatatttggatataggaataatattactaaattcaatatcttgcaattcatattagatttatcactaaaagactctaaattaacaaatagatgcctatctttattaaactatttgactattaaaatggacgataaaaaaatagtctcaaaacaagttaaacagtattttaaaaatagaaacgaagaaattagaaaattgttagtattttataataaaaataattatcatcaagaagcataccaaattcttgtttatattgttgaatatgatgtagatattcttttaaaaaatgatgttttgagtttgctaaatgaaaatacagataacttatctctatcgttattgacaataatatatctaagaaagtcttggaaaatagaaaatttattaaaaaaattgataatctatttaaaaattctaaggatgattatcctgcaacagtag

SEQ ID NO: 5448 - protein, 507 aa, Staphylococcus aureus
MKSKKRMERLYDDLFSTNFLINYGYFDITPKNNQDLTELNSYGKSDAFYLKIFNMSKLAEYITYNPFYIKKFFNDRNIRSTEPIIFTIPKNNTSRREYKIPNIYSYLNLMFFMQENKKEFKEVFLTNKFSTSKFFSLPDFDFKFTDNLKKTLLYGGNHILNVDLSNFYHSLYTHSIPWVIMGKKNAKKERKKGFSNQLDKLITSCQYNQTHGIPTGNILSRIISELYMCYIDSEMENKGYRYARYVDDISFSFNFEEEKDKFYRDFNKLCMKYELKINDKKTEVNDFPYIHPQNKDFIFNYFKNYSSNSKDETWIIGIKNFIDLCIDEERKGNKGAIKSIFPVIENTLKKKKINKHQISKIFGYRNNITKFNILQFILDLSLKDSKLTNRCLSLLNYLTIKMDDKKIVSKQVKQYFKNRNEEIRKLLVFYNKNNYHQEAYQILVYIVEYDVDILLKNDVLSLLNENTDNLSLSLLTIIYLRKSWKIENLLKKLIIYLKILRMIILQQ

SEQ ID NO: 5449 - DNA, 846 bp, Staphylococcus aureus
ttgaaaaagttaatatttttaattgcaattgctttagttttaagtgcatgtaattcaaacagtccacatgccaaaaagttaaatgatttagaaaaaaaatataatgctcatattggtgtttatgctttagatactaaaagtggtaaggaagtaaaatttaattcagataagagatttgcctatgcttcgacttcaaaagcgataaatagtgctattttgttagaacaaataccttataataagttaaataaaaaaatacatattaacaaagatgatatagttgcttattctcctattttagaaaaatatgtaggaaaagatatcactttaaaagaacttattgaggcttcaatgacatatagtgataatacagcaaacaataaaattataaaagaaatcggtgggatcaaaaaagttaaacaacgtctaaaagaactaggagataaagtaacaaatccagttagatatgagatagaattaaattactattcaccaaagagcaaaaaagatacttcaacacctgctgctttcggtaagactttaaataaacttatcgcaaatggaaaattaagcaaagaaaacaaaaaattcttacttgatttaatgttaaataataaaagcggagatactttaattaaagatggtgtttcaaaagactgtaaggtggctgataaaagtggtcaagcaataacatatgcttctagaaatgatgttgcttttgtttatcctaagggccaatctgaacctattgttttagtcatttttacgaataaagacaataaaagtgataagccaaatgataagttgataagtgaaaccgccaagagtgtaatgaaggaattttaa

SEQ ID NO: 5450 - protein, 281 aa, Staphylococcus aureus
MKKLIFLIAIALVLSACNSNSPHAKKLNDLEKKYNAHIGVYALDTKSGKEVKFNSDKRFAYASTSKAINSAILLEQIPYNKLNKKIHINKDDIVAYSPILEKYVGKDITLKELIEASMTYSDNTANNKIIKEIGGIKKVKQRLKELGDKVTNPVRYEIELNYYSPKSKKDTSTPAAFGKTLNKLIANGKLSKENKKFLLDLMLNNKSGDTLIKDGVSKDCKVADKSGQAITYASRNDVAFVYPKGQSEPIVLVIFTNKDNKSDKPNDKLISETAKSVMKEF

SEQ ID NO: 5451 - DNA, 1758 bp, Staphylococcus aureus
atggctaaattactaataacgagcgtagtaagcttttgttttatatttctattgttagtattttttaagtacatattaaaacgctattttaattatagtttaaattataaagtttggtatctaactgtgcttgctggattaattccttttatcccaattaaattctcttttataaaattgaataatgtgaataatcaagcgcccacagttgaaagtaagtcacacgacttgaaccataacataaataccaccaaacctgttcaagagttcacaacagatatccataagtttaattgggattcaattgataatatctgcacagttgtttggatagttttagttattattttaagttttaaatttttgaaatcattattatatcttaaatatttaaagaaacagtcactttatctaaacgaaaatgaaaaaaataaaatagatacgatacttttcaaccatcaatataaaaaaaatattgtgattcgaaaagcagagactattcaatctccaataactttttggtatgggaaatatattattttgattcctagttcatattttaaaagtgtaattgataaaagactaaaatatataatactgcatgaatatgctcatgctaaaaatagagatactttacatttaattatctttaatatcttctctattgttatgagttacaatccattaatacatattgtaaaaagaaagataattcatgacaatgaagtagaagccgatagatttgttcttaataatattaacaaaaatgaatttaaaacttatgcggaatctattatggactccgtattaaatattccattttttaataaaaatatattaagccattcatttaatggtaaaaagtcattactcaaaagaagattaattaatataaaagaagccaatttgaaaaaacagtccaaattaattccaatttttatttgtatttttacttttttgctcatggtaattcaaagccagtttttgatggggcaatccataactgattataattataaaaagcccttacagaacgatcaccaaattttagatgaaagtaaaaattttggttcaaatagtggatctttcgtcatgtacagcatgaagaaagacaaatactatatttataatgaaaaagaaagtagaaaaagatattctcctgattcaacttataaaatttatttagcgatgtttggacttgaccatcatatcataagtgataaaaattcacgtatgtcatggaatcataaacattatcctttcgagtcttggaataaggaacaagatttaaatacagcaatgcaaaattcagttaattggtacttcgaacgtattagtaatcaaataccaaagaactatactgcggctcaactcaagcaattaaattatggtaatgaaaacttgggaagttataaaagctattggatggaagatagtttgaaaatatctaatcttgaacaagtaatagtttttaaaaatatgatggaacaaaataaccattttagtaaaaaagcaaagaatcaattatcttcttcattattgattaagaaaaatgaaaagtatgaactgtatgggaaaacaggtacaggtatagtaaacgggaagtataataatgggtggtttgtaggttacgtaattacaaatcatgataagtattattttgctacacatttatcagatggaaagccgtctgggaaaaatgctgaattaatcagtgaaaaaatattaaaagaaatgggtgttttaaatggccaataa

SEQ ID NO: 5452 - protein, 585 aa, Staphylococcus aureus
MAKLLITSVVSFCFIFLLLVFFKYILKRYFNYSLNYKVWYLTVLAGLIPFIPIKFSFIKLNNVNNQAPTVESKSHDLNHNINTTKPVQEFTTDIHKFNWDSIDNICTVVWIVLVIILSFKFLKSLLYLKYLKKQSLYLNENEKNKIDTILFNHQYKKNIVIRKAETIQSPITFWYGKYIILIPSSYFKSVIDKRLKYIILHEYAHAKNRDTLHLIIFNIFSIVMSYNPLIHIVKRKIIHDNEVEADRFVLNNINKNEFKTYAESIMDSVLNIPFFNKNILSHSFNGKKSLLKRRLINIKEANLKKQSKLIPIFICIFTFLLMVIQSQFLMGQSITDYNYKKPLQNDHQILDESKNFGSNSGSFVMYSMKKDKYYIYNEKESRKRYSPDSTYKIYLAMFGLDHHIISDKNSRMSWNHKHYPFESWNKEQDLNTAMQNSVNWYFERISNQIPKNYTAAQLKQLNYGNENLGSYKSYWMEDSLKISNLEQVIVFKNMMEQNNHFSKKAKNQLSSSLLIKKNEKYELYGKTGTGIVNGKYNNGWFVGYVITNHDKYYFATHLSDGKPSGKNAELISEKILKEMGVLNGQ

SEQ ID NO: 5453 - DNA, 381 bp, Staphylococcus aureus
atggccaataagcaagttgaaatatctatggctgaatgggatgttatgaatataatatgggataaaaaatcagtatcagctaatgaaattgtagttgaaattcaaaaatataaagaagttagcgataaaacgattagaacattaatcacaagactatataaaaaagagattataaaacgatacaaatcagagaatatttatttttactcatcaaatattaaagaagacgatattaaaatgaaaactgctaaaacctttcttaataaactgtatggaggggacatgaaaagtttagtgctgaattttgcgaaaaatgaagaattaaataacaaagaaattgaagaattgcgagacattttaaatgatattagtaaaaagtaa

SEQ ID NO: 5454 - protein, 126 aa, Staphylococcus aureus
MANKQVEISMAEWDVMNIIWDKKSVSANEIVVEIQKYKEVSDKTIRTLITRLYKKEIIKRYKSENIYFYSSNIKEDDIKMKTAKTFLNKLYGGDMKSLVLNFAKNEELNNKEIEELRDILNDISKK

SEQ ID NO: 5455 - DNA, 420 bp, Staphylococcus aureus
gtggaattagataattgtataaattatttgttgagtacttctcagaatagagtgtttaaacattttaaaagtttattaagtccctataatattactccagcagaatatggtgttttgaattgcttgattaatagtaatttgaatacacctaaagcgattggtaatactttaaatttagaaccttcaacaatatctggaatattagataagatgtccaaaaaggatctaataacacgtcaaactgataatgaaaatagaagaactgtgctaataaacagtacaaataaagcaaaagacttatggccaacattagaaaagaaagcctatcaacttaataataattacttcgctaatttaactaatgaagaaactgtagtgtttaaaaagatattactaaagataaatgaaactacgttttaa

SEQ ID NO: 5456 - protein, 139 aa, Staphylococcus aureus
MELDNCINYLLSTSQNRVFKHFKSLLSPYNITPAEYGVLNCLINSNLNTPKAIGNTLNLEPSTISGILDKMSKKDLITRQTDNENRRTVLINSTNKAKDLWPTLEKKAYQLNNNYFANLTNEETVVFKKILLKINETTF

SEQ ID NO: 5457 - DNA, 972 bp, Staphylococcus aureus
atgttcaatgcggtagtagtgagaaaaagtgcatcaaatgttagttataaagtagaaaccgttgatgaatcttatttatcgaagggtgatgtcttagtaaaagtgttatactcttcaataaattataaggatatgctagctttacaatataacggcggtgtaattagagattatcctatgattcctggtatagattttgcaggtattgttgaatcaagttcgaatgataagtttaaagaaggcgataatgtattagttactggttatgatgtcggcgtgacacatacaggtggattttcagaatatgcacaagtgcctggagagtggattgttcctattccccaagaaatgtctattaaagagtctatggtatatggcacagccggttttacggcagcattatcaatttttgaactagaaaaatatggaatgaatatcaaatcacaacctgaaattttagtgtctggggctacaggtggtgtgggcagtgttgctatacaaattttacgtaaaattggatatgaaaatatcactgctatcgtaagaaaagaaaagcaaatagaaatcgcaaaaaaattaggtgcaaaacaagtaataataattgaagatgataataaaccacttaaaaaaggtatttttgattatttcctagatacagtagggaataatgtaacattatacggtttaaaacgtctaaattatcaaggtgttgctactgtatgtggaaatgtagcaggaaattcacttaacgctaatatattaccgtttattcttagaggtattaaattaattggcattgattctgtatgtgttgatcataatatccgtgaagatatatggagtaagttagcaaatgaatggaatataggaaattcacttctatacaatgaaattggatttgaagaattctataaaacgatagatcagcttttaaaaggacaacatttaggaagaactattttaaaagtataa

SEQ ID NO: 5458 - protein, 323 aa, Staphylococcus aureus
MFNAVVVRKSASNVSYKVETVDESYLSKGDVLVKVLYSSINYKDMLALQYNGGVIRDYPMIPGIDFAGIVESSSNDKFKEGDNVLVTGYDVGVTHTGGFSEYAQVPGEWIVPIPQEMSIKESMVYGTAGFTAALSIFELEKYGMNIKSQPEILVSGATGGVGSVAIQILRKIGYENITAIVRKEKQIEIAKKLGAKQVIIIEDDNKPLKKGIFDYFLDTVGNNVTLYGLKRLNYQGVATVCGNVAGNSLNANILPFILRGIKLIGIDSVCVDHNIREDIWSKLANEWNIGNSLLYNEIGFEEFYKTIDQLLKGQHLGRTILKV

SEQ ID NO: 5459 - DNA, 780 bp, Staphylococcus aureus
atgttaaataaaatcttacttttattgctctctgttacttttatgttgttatttttctctttacattcagtaagtgctaaaccagatccaagacctggagaattgaatagagttagtgattataaaaaaaacaaaggtactatggggaatgttgaatccttatataaggataaagcggtaatagcagaaaatgttaaaaatactagacaattcttaggacatgatttgatttttcctattccttattcagaatacaaagaagttaaaagtgaatttataaataaaaaaacagctgataaatttaaagacaaacggttagatgtgtttggaataccctatttttatacatgtttagtacctaagaatgaatcaagagaagaatttatttttgatggagtttgcatatacgggggcgttacaatgcactccacagctgatagtatatccaaaaatataattgttccagttactgtagataataaacaacagttctcttttacaattagtacaaataaaaaaacggttacggtacaagagctagattataaagtaaggaattggttgactaacaataaaaaattatatgaatttgatgggtcggcatatgagacgggttatatcaaatttattgaagaaaataaagatagtttttggtacgatttgtttcctaaaaaggatttggttccctttataccttataaatttgtaaatatttatggagataataaaactatagatgcttcgagtgttaagatagaagttcacctgactacaacgtga

SEQ ID NO: 5460 - protein, 259 aa, Staphylococcus aureus
MLNKILLLLLSVTFMLLFFSLHSVSAKPDPRPGELNRVSDYKKNKGTMGNVESLYKDKAVIAENVKNTRQFLGHDLIFPIPYSEYKEVKSEFINKKTADKFKDKRLDVFGIPYFYTCLVPKNESREEFIFDGVCIYGGVTMHSTADSISKNIIVPVTVDNKQQFSFTISTNKKTVTVQELDYKVRNWLTNNKKLYEFDGSAYETGYIKFIEENKDSFWYDLFPKKDLVPFIPYKFVNIYGDNKTIDASSVKIEVHLTTT

SEQ ID NO: 5461 - DNA, 807 bp, Staphylococcus aureus
atgaaaaaaacaatatttatactgattttctccctgacgttaacactactaataacccctttagtttacagcgatagcaaaaatgaaacaattaaagaaaagaatttgcacaaaaaatcagagttaagtagtattactttaaataacctcagacatatatacttctttaacgaaaagggtatctctgaaaagataatgacagaagatcaatttttagattacacactattatttaaaagttttttcataagtcattcacagtataacgacttattggtacaattcgattcaaaagaaacagttaataagtttaaaggcaaacaagtagatctatacggatcttattatggttttcaatgttctggtggtaaaccaaataaaacagcatgtatgtatggtggagtaacactgcatgaaaacaatcaactttatgatactaaaaaaatacctattaatttatggattgatagcatcagaactgttgttccgctagatatagttaaaacaaataagaaaaaagtaaccattcaagaactagatcttcaggcaagatattatttacataaacaatataatttatacaaccctagtacttttgatggtaaaattcagaaaggactaatcgtgtttcatacctcaaaagaaccgttggttagttatgatttatttaatgttataggtcaatatccagacaaattattaaaaatataccaagataataaaatcatagaatctgaaaacatgcatatcgatatatatttatatacaagcctaattgtattaataagtctacctttggttctgtag

SEQ ID NO: 5462 - protein, 268 aa, Staphylococcus aureus
MKKTIFILIFSLTLTLLITPLVYSDSKNETIKEKNLHKKSELSSITLNNLRHIYFFNEKGISEKIMTEDQFLDYTLLFKSFFISHSQYNDLLVQFDSKETVNKFKGKQVDLYGSYYGFQCSGGKPNKTACMYGGVTLHENNQLYDTKKIPINLWIDSIRTVVPLDIVKTNKKKVTIQELDLQARYYLHKQYNLYNPSTFDGKIQKGLIVFHTSKEPLVSYDLFNVIGQYPDKLLKIYQDNKIIESENMHIDIYLYTSLIVLISLPLVL

SEQ ID NO: 5463 - DNA, 168 bp, Staphylococcus aureus
atgactttttctttattaacaaaagtagctatgtctggattaatattaactggtgccataggaacagccggattagttagtgtgcctgttgccaatgttgaggctaaagcagcagagttcaatcccaaagtagacaaattattaaaatttgaagtttctaaaaagtaa

SEQ ID NO: 5464 - protein, 55 aa, Staphylococcus aureus
MTFSLLTKVAMSGLILTGAIGTAGLVSVPVANVEAKAAEFNPKVDKLLKFEVSKK

SEQ ID NO: 5465 - DNA, 777 bp, Staphylococcus aureus
atgaaaaaatttaacattcttattgcattactcttttttactagtttggtaatatctcctttaaacgttaaagccaatgaaaacattgattcagtaaaagagaaagaattgcataaaaaatctgaattaagtagtaccgcgctaaataatatgaaacattcttatgcagataaaaatccaataataggagaaaataaaagtacaggagatcaatttttagaaaatactttgctttacaaaaatttttttactgaccttatcaattttgaagatttattaataaacttcaattcaaaagaaatggctcaacatttcaaatctaaaaatgtagatgtttacgctataagatatagcattaattgttatggtggtgaaatagataagactgcttgtacatatggaggtgtcactccacacgaaggtaataaattaaaagaacgaaaaaaaataccaatcaatttgtggataaatggtgtacaaaaagaagtttctttagataaagttcaaacagataaaaaaaatgttaccgtacaagaattagatgcacaagcaaggcgctatttgcaaaaggatttaaaattgtataataatgatactctcggaggaaaaatacagcgcggaaaaatagagtttgattcttctgatgggtctaaagtctcttatgatttatttgatgttaagggtgattttcccgaaaaacaattacgaatatacagtgataataaaacattatccacagagcaccttcatattgacatctatttatatgaaaagtag

SEQ ID NO: 5466 - protein, 258 aa, Staphylococcus aureus
MKKFNILIALLFFTSLVISPLNVKANENIDSVKEKELHKKSELSSTALNNMKHSYADKNPIIGENKSTGDQFLENTLLYKNFFTDLINFEDLLINFNSKEMAQHFKSKNVDVYAIRYSINCYGGEIDKTACTYGGVTPHEGNKLKERKKIPINLWINGVQKEVSLDKVQTDKKNVTVQELDAQARRYLQKDLKLYNNDTLGGKIQRGKIEFDSSDGSKVSYDLFDVKGDFPEKQLRIYSDNKTLSTEHLHIDIYLYEK

SEQ ID NO: 5467 - DNA, 1038 bp, Staphylococcus aureus
atggctttaggtatattatcaaaattggcaatggcaggtattgttttaactagcgttacaggcgctgcaactctaggaggcgtttctagtattgctcatgaagtacatgcagaggaaaacgctaatcaagaacactttgagaaaactttagaaggtaaggtattaaatttcaaagatgtattgagtaaaaatacaatatcaataaaagacttcagtaaagcagttgaaaatgaattgaaaaataaaggctttgaccctagtgagtataaacttaaatttaaggtaaaagtaggacatagtgtgtatcaaagtagtgatggaggaaatttaattgttggtaatgaacatattggcactgcaactgccgaattcaatcctactaaacacaaattaggggtatatgaatctgaaatagaaaagattattgattatattattaaaaatattacatttaaggacttagatgtttcagtaaatatgcaaaacaagatttttcaatatattcatttacaatatttacgtactgacgccggaagaattaattttatgaatttaattgaaaatccgtttacatataaacctagaaaaaaacctatcgatctagatgaaatacaaaaacacaaaaatacaataataaagtttaatgaaatttttaagcaaggcaacaacctagaaaacttattaaaaagaatgaaaaaaccatctaacatgaattttcatattgcaataagtgaagataatttattaactagtgataatccagtaatcgctactgataattggaaccaaataatgcttccaattactccaaatattcttatagaatttcaagaagataaaattaactcatctaacgatttaagagtaatattaaaaaaaaataaaacaagatatgtaaatgaagcaacaattaatacagcaaattattttgttatatcaaataaagagtttacccgttatcaatataaatatatagacaatcgctttaataataagaattgggagattggttatcctcatgtaaatttgaaaaattaa

SEQ ID NO: 5468 - protein, 345 aa, Staphylococcus aureus
MALGILSKLAMAGIVLTSVTGAATLGGVSSIAHEVHAEENANQEHFEKTLEGKVLNFKDVLSKNTISIKDFSKAVENELKNKGFDPSEYKLKFKVKVGHSVYQSSDGGNLIVGNEHIGTATAEFNPTKHKLGVYESEIEKIIDYIIKNITFKDLDVSVNMQNKIFQYIHLQYLRTDAGRINFMNLIENPFTYKPRKKPIDLDEIQKHKNTIIKFNEIFKQGNNLENLLKRMKKPSNMNFHIAISEDNLLTSDNPVIATDNWNQIMLPITPNILIEFQEDKINSSNDLRVILKKNKTRYVNEATINTANYFVISNKEFTRYQYKYIDNRFNNKNWEIGYPHVNLKN

SEQ ID NO: 5469 - DNA, 813 bp, Staphylococcus aureus
ttgagtttaaaggacatagaattttggatgagtttatacgatattcttaaagatgtgtggtttttaattttaattcctattgttattagtattgtaaaactattgaataaaaatgacttatatcagactcgaaatgttgagaaaataaagatggtattaaaaaatacgcggttatttattttgattactattggagcactgatatatttggtgtcgatgatatttttttcattgagtgcctatcctaaagacgaagttatggaatatatatctaaatgggataacattggttcattcaccattttaatcattatgtatgccatgttgtttccaatagttacaattccttttcttggagaacgtagaaataagcgattctttttagaaaagaataataacgaggttatagaaagagaaatcattgaccgtgtctatatcaacggaaaagataaattaattttaaaagatggcgaaggtattcaaactgaaaagaatgttacagatatagataatttaacatttaaaatacaagataaaaaatcatggatagcaatggaagatatacaaaaaatctttttaaaatttcaagacagaagcaaaaaaaagagaatctccatttttatttttatatgtagtattccaacagtttatttagcttggaatttaccgagcataattgatatgtttactaaattacaaaaatggacagatatatttatgtatatcagtttttttactttgccattgatactgatcatagaattatattacgttgtctacattgtttataaaagtttatttaaaaaggtctaa

SEQ ID NO: 5470 - protein, 270 aa, Staphylococcus aureus
MSLKDIEFWMSLYDILKDVWFLILIPIVISIVKLLNKNDLYQTRNVEKIKMVLKNTRLFILITIGALIYLVSMIFFSLSAYPKDEVMEYISKWDNIGSFTILIIMYAMLFPIVTIPFLGERRNKRFFLEKNNNEVIEREIIDRVYINGKDKLILKDGEGIQTEKNVTDIDNLTFKIQDKKSWIAMEDIQKIFLKFQDRSKKKRISIFIFICSIPTVYLAWNLPSIIDMFTKLQKWTDIFMYISFFTLPLILIIELYYVVYIVYKSLFKKV

SEQ ID NO: 5471 - DNA, 678 bp, Staphylococcus aureus
ttgattgcttgtatttctttaggaatatctatttttgctttaggtatttcaatatatactgtgttttatcagagaaaaaaagataataatcttttaagacctcaactttttttagaatctcaaaataagcaaactgtagattacataggtattaatttagatattggaggttacgaaaagctacaggaatatgatgttttattaacatttattaatacaacgcaagtaagaattatagatttgtctgtatctattgatgtgaggaaaaatgatacttttgattatttattaagtaaagcattagaagaaaaagaaaacaattttgatatagaaaaagatatgtttggtaatgatacttatggttgggataaagtttttggtttggaagaaacgacaaaagaaaaaatatcagttcttgatggcggagattcattcgaattgagattaccaagtattttttcagctttattattaggtgccatgtatttaaatagaaatgactttacagaatctaactttacaatagattttgatgtaaaaattttatataatcatgattttgctaataaaggtaaatatgtttgtgtaaataagactgtttcagtaaatatcacttatgaaagagcgattcaaggaccatgggttgtttatgattctattatttttgataaattgtga

SEQ ID NO: 5472 - protein, 225 aa, Staphylococcus aureus
MIACISLGISIFALGISIYTVFYQRKKDNNLLRPQLFLESQNKQTVDYIGINLDIGGYEKLQEYDVLLTFINTTQVRIIDLSVSIDVRKNDTFDYLLSKALEEKENNFDIEKDMFGNDTYGWDKVFGLEETTKEKISVLDGGDSFELRLPSIFSALLLGAMYLNRNDFTESNFTIDFDVKILYNHDFANKGKYVCVNKTVSVNITYERAIQGPWVVYDSIIFDKL

SEQ ID NO: 5473 - DNA, 261 bp, Staphylococcus aureus
atggcaatgacagtaaaaaaggataataatgaagtgcgtattcaatggagagttgctgatatcaaaattcctacaagtgaaattaaaaatattacacaagaccaagatattcatgcagttcctaaattagacagcaaagatgtatctagaatcggctcaacgtttggtaaaacgaatcgcgttattatcgatactgaagaccacgaatacattatttatactcaaaatgatcaaaaagtttacaatgaattaactaaataa

SEQ ID NO: 5474 - protein, 86 aa, Staphylococcus aureus
MAMTVKKDNNEVRIQWRVADIKIPTSEIKNITQDQDIHAVPKLDSKDVSRIGSTFGKTNRVIIDTEDHEYIIYTQNDQKVYNELTK

SEQ ID NO: 5475 - DNA, 1002 bp, Staphylococcus aureus
atgaagttgacagctttgcatttttataaatatagtgagccatttaagtcacaaattgtaacaccgaaagtcactttaacgcatcgtgattgtttgtttatcgaattgattgatgacaaaggaaatgcatatttcggggaatgtaacgcttttcaaacagattggtatgatcatgaaacaattgcctcagtgaaacatgtaattgagcaatggttcgaagataatagaaataaatcatttgaaacgtatgaagcagcactaaaattagtagattcattggaaaatacgcctgctgcaagggcaactattgtcatggcattgtatcaaatgtttcatgtactgccttcattttcagtagcatatggagcgacagcgagcggcttatcaaataaacaactagagtcattaaaagcaacaaagccgaccagaattaaattaaaatggacgcctcaaatcatgcatcaaattagagtgttacgggaattagactttcactttcaattggttatagatgcaaatgagtccttggatcgtcaagatttcacacagttacagttattagcgcgtgaacaggttctttatatcgaagagccatttaaagatatctccatgcttgatgaagtagcggatggaacaatacctccaatagcccttgatgaaaaggcaacatcgttgttggacataattaatttgatagaattatacaatgtgaaagttgttgtattaaaaccatttcgtctaggtggcattgataaagtgcaaacggcaattgatactttgaaaagtcatggtgcaaaagtggttattggcggcatgtacgaatatggtttaagccgctattttacagcgatgcttgctcgtaaaggtgattatccaggagatgttacaccagcaggttattattttgaacaagatgtggtggcgcattcaggcatattaaaagaggggcgactcgaatttcgcccccctttagtggatataactcaattacaaccatattaa

SEQ ID NO: 5476 - protein, 333 aa, Staphylococcus aureus
MKLTALHFYKYSEPFKSQIVTPKVTLTHRDCLFIELIDDKGNAYFGECNAFQTDWYDHETIASVKHVIEQWFEDNRNKSFETYEAALKLVDSLENTPAARATIVMALYQMFHVLPSFSVAYGATASGLSNKQLESLKATKPTRIKLKWTPQIMHQIRVLRELDFHFQLVIDANESLDRQDFTQLQLLAREQVLYIEEPFKDISMLDEVADGTIPPIALDEKATSLLDIINLIELYNVKVVVLKPFRLGGIDKVQTAIDTLKSHGAKVVIGGMYEYGLSRYFTAMLARKGDYPGDVTPAGYYFEQDVVAHSGILKEGRLEFRPPLVDITQLQPY

SEQ ID NO: 5477 - DNA, 552 bp, Staphylococcus aureus
atggagaaaaatgaatatatagctaaatataatgaatatagtcaattattagacgctacatactcgcaagctgtagcataccttttaagtaaatatggcgctgtaaccgatgattattataaagaaaaatcatacacgcgatttttaaatggagaaatcaaaagtatttcaaaaggaaaatacactagagctagcgaaggattatattgccatcatataagcgaggacaaattccaaaatctatctgatctaagattcatttccaaatttaagtactcatacgacgttcaaaagaaagaaaacttagtgtactgtgatctaatcgagcatttaattttacatgcaattattacaaaagaatcccatggccaatttggtgtagctggattatgtcaaatgatcaaaccaacagtcattgattggtacattggcgaatataatccaaaaccagcatggatgcaagccaccaaagcacgtgcctatttgcctggaatattagtagagaaattactcattaaaattgacgatatgttaaaaggaatagaaatataa

SEQ ID NO: 5478 - protein, 183 aa, Staphylococcus aureus
MEKNEYIAKYNEYSQLLDATYSQAVAYLLSKYGAVTDDYYKEKSYTRFLNGEIKSISKGKYTRASEGLYCHHISEDKFQNLSDLRFISKFKYSYDVQKKENLVYCDLIEHLILHAIITKESHGQFGVAGLCQMIKPTVIDWYIGEYNPKPAWMQATKARAYLPGILVEKLLIKIDDMLKGIEI

SEQ ID NO: 5479 - DNA, 303 bp, Staphylococcus aureus
atgtctcgttcaaaaaaatacttttacttatctagcttaatgattattttaagctttttctttaatacaaataacgttttcctaagtggactttttaattcttttattaaattaatacttttctgcagtgttattaactcaattgtactaattttgtctataatttttgcagatcgttcaattaaatcactaaagcctgatgcagattggattagaattgcgagtaaaagtttgccttggattattctaattgttattttagtacatatcttttcaattgttcgtacattcggttttatttaa

SEQ ID NO: 5480 - protein, 100 aa, Staphylococcus aureus
MSRSKKYFYLSSLMIILSFFFNTNNVFLSGLFNSFIKLILFCSVINSIVLILSIIFADRSIKSLKPDADWIRIASKSLPWIILIVILVHIFSIVRTFGFI

SEQ ID NO: 5481 - DNA, 309 bp, Staphylococcus aureus
atgtggacagttaccaaaattagagccgattatgagggatggtggttattcagtgactggccagaaaacattgttgaaaaatatcaatatcaagattttgatgacatgtttaagcactatcaacaattgattaatcaatgtaaagttcagttcgataactatgtcacaggcaaatataatatttatgcattttataataattgtgacatgaactattgcgaagattgtgaagaggatttacaaatattttatagtttcattgttttacaaaataatgaagtatattataaactaccaataattgattaa

SEQ ID NO: 5482 - protein, 102 aa, Staphylococcus aureus
MWTVTKIRADYEGWWLFSDWPENIVEKYQYQDFDDMFKHYQQLINQCKVQFDNYVTGKYNIYAFYNNCDMNYCEDCEEDLQIFYSFIVLQNNEVYYKLPIID

SEQ ID NO: 5483 - DNA, 402 bp, Staphylococcus aureus
atgaaaaatagttatcaatcccaaaaagtgattgaagaagtgtttaaagaaaagccgaattctcgttggttgtttcttacattatcaatacgaaatgcaataggtggagatacgttagaacaaaatttaacacatttaactgagtcgtttagaagattatttaaatataaaaaaatcagtaaaaatttaattggctttatgcattcaactgaagtaacagttaataaaaatgacggtagttataatcaacatatgcacgttttgttgtgtgttgaaaatgcgtattttagaaagaaaaaatatattacacaaacagaattggttgatttatggcaacaagcattaaaagtaaattatcgacctgtcgtaaatattaaagcgatcaaaccaaaaaggagataa

SEQ ID NO: 5484 - protein, 133 aa, Staphylococcus aureus
MKNSYQSQKVIEEVFKEKPNSRWLFLTLSIRNAIGGDTLEQNLTHLTESFRRLFKYKKISKNLIGFMHSTEVTVNKNDGSYNQHMHVLLCVENAYFRKKKYITQTELVDLWQQALKVNYRPVVNIKAIKPKRR

SEQ ID NO: 5485 - DNA, 477 bp, Staphylococcus aureus
atgaaagaaagatatggaacagtctataaaggctctcagaggctcatagacgaagaaagtggagaagtcatagaggtagacaagttataccgtaaacaaacgtctggtaacttcgtaaaggcatatatagtgcaattaataagtatgttagatatgattggcggaaaaaaacttaaaatcgttaactatatcctagataatgtccacttaagtaacaatacaatgatagctacaacaagagaaatagcaaaagctacaggaacaagtctacaaacagtaataacaacacttaaaatcttagaagaaggaaatattataaaaagaaaaactggagtattaatgttaaaccctgaactactaatgagaggcgacgaccaaaaacaaaaatacctcttactcgaatttgggaactttgagcaagaggcaaatgaaaaacaagaaaatgcattatctgattattattctttcaaggactag

SEQ ID NO: 5486 - protein, 158 aa, Staphylococcus aureus
MKERYGTVYKGSQRLIDEESGEVIEVDKLYRKQTSGNFVKAYIVQLISMLDMIGGKKLKIVNYILDNVHLSNNTMIATTREIAKATGTSLQTVITTLKILEEGNIIKRKTGVLMLNPELLMRGDDQKQKYLLLEFGNFEQEANEKQENALSDYYSFKD

SEQ ID NO: 5487 - DNA, 735 bp, Staphylococcus aureus
atgaacgagaaaaatataaaacacagtcaaaactttattacttcaaaacataatatagataaaataatgacaaatataagattaaatgaacatgataatatctttgaaatcggctcaggaaaagggcattttacccttgaattagtacagaggtgtaatttcgtaactgccattgaaatagaccataaattatgcaaaactacagaaaataaacttgttgatcacgataatttccaagttttaaacaaggatatattgcagtttaaatttcctaaaaaccaatcctataaaatatttggtaatataccttataacataagtacggatataatacgcaaaattgtttttgatagtatagctgatgagatttatttaatcgtggaatacgggtttgctaaaagattattaaatacaaaacgctcattggcattatttttaatggcagaagttgatatttctatattaagtatggttccaagagaatattttcatcctaaacctaaagtgaatagctcacttatcagattaaatagaaaaaaatcaagaatatcacacaaagataaacagaagtataattatttcgttatgaaatgggttaacaaagaatacaagaaaatatttacaaaaaatcaatttaacaattccttaaaacatgcaggaattgacgatttaaacaatattagctttgaacaattcttatctcttttcaatagctataaattatttaataagtaa

SEQ ID NO: 5488 - protein, 244 aa, Staphylococcus aureus
MNEKNIKHSQNFITSKHNIDKIMTNIRLNEHDNIFEIGSGKGHFTLELVQRCNFVTAIEIDHKLCKTTENKLVDHDNFQVLNKDILQFKFPKNQSYKIFGNIPYNISTDIIRKIVFDSIADEIYLIVEYGFAKRLLNTKRSLALFLMAEVDISILSMVPREYFHPKPKVNSSLIRLNRKKSRISHKDKQKYNYFVMKWVNKEYKKIFTKNQFNNSLKHAGIDDLNNISFEQFLSLFNSYKLFNK

SEQ ID NO: 5489 - DNA, 1005 bp, Staphylococcus aureus
atgcaagttaatcatacaaaatatatagacgaaaatcaagataataaaacattaaaagatatgacgaaaagtgggaaacaacgcccatggagagaaaagaaaatagataatgtaagttatgcagatatactggaaatcttaaaaataaaaaaggcttttaacgtaaaacaatgtggtaacgtcttagagttcaagccaactgatgaaggttatttgaaattacataagacatggttttgtaagtcaaaattatgcccagtttgtaattggaggcgtgctatgaaaaatagttatcaagctcaaagagtgattgaagaagttgttaaagaaaagccaactgctcggtggttatttcttactttgtcgacaaaaaatgcaatagatggtgaccacttggaacaaagtttaaagcatatgtctaaggcttttaataaattaaagatgtatacaaaagttaaaaagaatttggtaggttttttacgttcaactgaagttacagttaataaaattgacggtagttataatcaacatatgcatgttttgttatgtgttgaaaatgcgtattttagaaaaaaagaaaattatattacgcagactgaatgggtcgatttatggcaaaaagcattacaagtaaattatcgacccgtagcaaatattaaagcgatcaaaccaaatcaaaaaggagataaagatattcaagcagctatcaaagaaacctctaaatattcggttaagtcatctgattttttaactgatgatgacgaaagaaatcaagaaatcgtgaacgatttagaaaaaggtttataccgaaaacgtatgttgagttatggtggattgcttaaacaaaaacataaaattttaaatttagacgatgccgaagatggcaatttaattaatacaagtgacgaagataaaacaacagacgaagaagaaaaggcgcattcaattactgcgatttggaattttgaaaaacaaaattattacttaaaagatttgaaacgttag

SEQ ID NO: 5490 - protein, 334 aa, Staphylococcus aureus
MQVNHTKYIDENQDNKTLKDMTKSGKQRPWREKKIDNVSYADILEILKIKKAFNVKQCGNVLEFKPTDEGYLKLHKTWFCKSKLCPVCNWRRAMKNSYQAQRVIEEVVKEKPTARWLFLTLSTKNAIDGDHLEQSLKHMSKAFNKLKMYTKVKKNLVGFLRSTEVTVNKIDGSYNQHMHVLLCVENAYFRKKENYITQTEWVDLWQKALQVNYRPVANIKAIKPNQKGDKDIQAAIKETSKYSVKSSDFLTDDDERNQEIVNDLEKGLYRKRMLSYGGLLKQKHKILNLDDAEDGNLINTSDEDKTTDEEEKAHSITAIWNFEKQNYYLKDLKR

SEQ ID NO: 5491 - DNA, 348 bp, Staphylococcus aureus
atgagttatgaaaatacttgtgatgtgatctgtgtacatgaggataaagttaacaatgctttaagttttttagaagatgataaatctaagaaattacttaacattttagaaaaaatttgtgatgagaagaaattgaaaatcatattatctttgattaaagaagatgagttgtgtgtttgtgatatttctttgatattgaaaatgagtgttgcttcaacttcacatcatttaaggcttttatataaaaatgaggtacttgatttttataaagatggaaagatggcatattattttattaaagacgatgaaataagagagtttttctctaaaaatcatgagggtttttga

SEQ ID NO: 5492 - protein, 115 aa, Staphylococcus aureus
MSYENTCDVICVHEDKVNNALSFLEDDKSKKLLNILEKICDEKKLKIILSLIKEDELCVCDISLILKMSVASTSHHLRLLYKNEVLDFYKDGKMAYYFIKDDEIREFFSKNHEGF

SEQ ID NO: 5493 - DNA, 618 bp, Staphylococcus aureus
atgattcaaacggttgttgctgctgctgttctttatattgctacagcagttgatttattagtaattttattaatattttttgctagagcaaagactagaaaagaatatagagatatttatgttggtcaatatttagggtctattattttaatattagttagtttgtttttagcttttgtattaaattatgttccagaaaagtggatattaggtttattgggtttaataccaatttatcttggaattaaagtggctatttatgatgattgtgaaggagaaaagagagctaaaaaagaattgaatgaaaaaggattgtctaaattagttggtacggttgcaattgttacgatagcaagttgtggcgccgataatattggtttatttgttccgtattttgtgacattaagtgttactaatttattacttactctgtttgtctttttaattttaattttcttcttggtgtttactgcacaaaaattagctaatatcccaggaattggagaaattgttgagaaatttagtcgttggattatggctatcatttatatagctttaggtttatttattattattgaaaatgacactattcaaacaattttaggatttatattttaa

SEQ ID NO: 5494 - protein, 205 aa, Staphylococcus aureus
MIQTVVAAAVLYIATAVDLLVILLIFFARAKTRKEYRDIYVGQYLGSIILILVSLFLAFVLNYVPEKWILGLLGLIPIYLGIKVAIYDDCEGEKRAKKELNEKGLSKLVGTVAIVTIASCGADNIGLFVPYFVTLSVTNLLLTLFVFLILIFFLVFTAQKLANIPGIGEIVEKFSRWIMAIIYIALGLFIIIENDTIQTILGFIF

SEQ ID NO: 5495 - DNA, 243 bp, Staphylococcus aureus
atgacagataacgcacgcaaagaatacctaaatcaattctttggatctaagagatatctgtatcaagataacgaacgagtggcacatatccatgtagcaaacggcaattattactttcacgggcatatcgtaccaggttggcaaggcgtaaagaagacgtttgatacagccgaagagctagaaatatatataaagcaacatggtttggaatacgagaaacagaagcaactaactttattttag

SEQ ID NO: 5496 - protein, 80 aa, Staphylococcus aureus
MTDNARKEYLNQFFGSKRYLYQDNERVAHIHVANGNYYFHGHIVPGWQGVKKTFDTAEELEIYIKQHGLEYEKQKQLTLF

SEQ ID NO: 5497 - DNA, 345 bp, Staphylococcus aureus
atgatctgcggttgtttagatgccgagccattattagctgttggtgatgagtctcttacattcgctatatcagcgtttttattatctaccataacttttattctagattttgttactgttggtttagttatagaatttaataatttttctctgtttttaaatatattaaataatgccttttctaatgcttcgtatttatctttagggggaacaccgttgtcaatcatattccaattaacatgttccaacatcgaacgccaaatgctgtcgtctacttttaaattttcaatacttagaggtatctcatatttggccatcatatctacagctacaaccattgcgtga

SEQ ID NO: 5498 - protein, 114 aa, Staphylococcus aureus
MICGCLDAEPLLAVGDESLTFAISAFLLSTITFILDFVTVGLVIEFNNFSLFLNILNNAFSNASYLSLGGTPLSIIFQLTCSNIERQMLSSTFKFSILRGISYLAIISTATTIA

SEQ ID NO: 5499 - DNA, 147 bp, Staphylococcus aureus
atgaacactaaaattttaactggaatgactggaagttctttagaacgaaaaatcaataattttattaatgataaccaaatcgaagtcattgatattaagttttcaagttctgtattttattttggggtaatgattatttataaataa

SEQ ID NO: 5500 - protein, 48 aa, Staphylococcus aureus
MNTKILTGMTGSSLERKINNFINDNQIEVIDIKFSSSVFYFGVMIIYK

SEQ ID NO: 5501 - DNA, 189 bp, Staphylococcus aureus
ttgaataaagacacagtgttagataaaggttacgttatagcaactattttaaatgttttctttttacttggattaatttttatatctcattttgaaaatttatatatattaattctgtatgttattttgatgggaataaatgctatttatttggttgttaaggttttgaatttcaaaaagaataattag

SEQ ID NO: 5502 - protein, 62 aa, Staphylococcus aureus
MNKDTVLDKGYVIATILNVFFLLGLIFISHFENLYILILYVILMGINAIYLVVKVLNFKKNN

SEQ ID NO: 5503 - DNA, 318 bp, Staphylococcus aureus
atgaattgggaaattaaagatttaatgtgtgacattgaagtgataaaacaaaaaattaatgatgtagctaccaaacatgcttggtttgttgaagatagatttgtaaaaaatgaattagaaacaaaacgggaacatattaatttttctgctagctatttagaacatcgtatacaaaatgaacatacagttgagttattacatgtgtacttaaaagaattcggtgaacttatacaaaaatttcatgaaatagaaaaagcatcatctgagaactttggcgaggtatcagatgacgcacaaaaattaaaaatcacagagtaa

SEQ ID NO: 5504 - protein, 105 aa, Staphylococcus aureus
MNWEIKDLMCDIEVIKQKINDVATKHAWFVEDRFVKNELETKREHINFSASYLEHRIQNEHTVELLHVYLKEFGELIQKFHEIEKASSENFGEVSDDAQKLKITE

SEQ ID NO: 5505 - DNA, 765 bp, Staphylococcus aureus
atgttaaatgtattattattaattttaaatttaattgcaatatgtagtgtaaacaatgcatatgcaaatgaagaagatcctaaaatagagagtttgtgtaagaagtcaagtgtagaccctattgctttacataatattaatgatgattatataaataatcgatttacgacagtaaaatcaattgtatcaactacagaaaaattcttagacttcgatttattatttaaaagtattaattggttagatggaatatctgctgaatttaaagatttaaaagtggaatttagctcatcagcgatttctaaagaatttctaggaaagactgttgatatttatggtgtttactataaagcacattgtcatggtgagcatcaagtggatactgcctgtacatatggtggggtaacacctcatgaaaataataaattaagcgagcctaaaaatataggagtagctgtgtataaggataatgtaaatgttaatacatttatcgttactacagataaaaagaaagttactgcacaagaacttgatattaaagtaagaacaaaattaaataatgcatataaattgtatgacagaatgactagtgatgtacaaaaaggttatattaaatttcattctcattcggagcataaagaatcattttattatgatttattttatattaaaggaaatttaccagatcaatatttgcaaatttataatgataataaaacaatagattcatcagactatcatattgatgtttatttatttacataa

SEQ ID NO: 5506 - protein, 254 aa, Staphylococcus aureus
MLNVLLLILNLIAICSVNNAYANEEDPKIESLCKKSSVDPIALHNINDDYINNRFTTVKSIVSTTEKFLDFDLLFKSINWLDGISAEFKDLKVEFSSSAISKEFLGKTVDIYGVYYKAHCHGEHQVDTACTYGGVTPHENNKLSEPKNIGVAVYKDNVNVNTFIVTTDKKKVTAQELDIKVRTKLNNAYKLYDRMTSDVQKGYIKFHSHSEHKESFYYDLFYIKGNLPDQYLQIYNDNKTIDSSDYHIDVYLFT

SEQ ID NO: 5507 - DNA, 729 bp, Staphylococcus aureus
atgaaaaaatttaaatatagttttatattagtttttatattactttttaacattaaagatcttacgtatgctcaaggtgatattggtgtaggtaacttaagaaatttctatacaaaacatgattatatagatttaaaaggcgtcacagataaaaatctacctattgcaaatcaactcgaattttcaacaggtaccaatgatttgatctcagaatctaataattgggacgaaataagtaaatttaaaggaaagaaactggatatttttggcattgattataatggtccttgtaaatctaaatacatttttggaggggccactttatcaggacaatacttaaattctgctagaaaaatccctattaatctttgggttaatggcaaacataaaacaatttctactgacaaaatagcaactaataaaaaactagtaacagctcaagaaattgatgttaaattaaggagatatcttcaagaagaatacaatatatatggtcataataacactggtaaaggcaaagaatatggatataaatctaaattttattcaggttttaataatgggaaagttttatttcatttaaataatgaaaaatcattttcatatgatttgttttatacaggagatggactgcctgtaagttttttgaaaatttatgaagataataaaataatagaatctgaaaaatttcatcttgatgtcgaaatatcatatgtagatagtaactaa

SEQ ID NO: 5508 - protein, 242 aa, Staphylococcus aureus
MKKFKYSFILVFILLFNIKDLTYAQGDIGVGNLRNFYTKHDYIDLKGVTDKNLPIANQLEFSTGTNDLISESNNWDEISKFKGKKLDIFGIDYNGPCKSKYIFGGATLSGQYLNSARKIPINLWVNGKHKTISTDKIATNKKLVTAQEIDVKLRRYLQEEYNIYGHNNTGKGKEYGYKSKFYSGFNNGKVLFHLNNEKSFSYDLFYTGDGLPVSFLKIYEDNKIIESEKFHLDVEISYVDSN

SEQ ID NO: 5509 - DNA, 771 bp, Staphylococcus aureus
atgaagttatttgcttttatcttcatatgtgttaagtcttgcagcttactatttatgttaaatggcaatcctaaaccagaacaattgaataaagcgagtgaattcactggtctaatggataatatgaggtatttgtatgatgataaacacgtatcagaaacaaacattaaatcccaagaaaagtttttacaacatgatttattatttaaaataaatggttctaaaattttaaaaacagaatttaataataaaagcctttcggataaatataaaaataaaaacgtagatttgtttgggacaaactattataatcaatgctatttttcatcggataatatggaattaaatgatggtagattaattgaaaaaacgtgtatgtatggcggtgtgaccgagcatgatggaaatcaaatagataaaaataattcaactgataactctcataatatcttaattaaagtttatgaaaacgagagaaattcattatcttttgatatacctactaataagaaaaacataacagcacaagaaatagattataaagttagaaactatttacttaagcataaaaatttatatgaatttaacagttcgccttatgagactggctatataaagtttatcgaaggaagtggtcattctttttggtatgatttgatgcctgaatctggtaaaaaattttatccgactaaatatttactaatttataatgataataaaacagttgagagtaaatctattaatgtagaagttcatttaaccaaaaaataa

SEQ ID NO: 5510 - protein, 256 aa, Staphylococcus aureus
MKLFAFIFICVKSCSLLFMLNGNPKPEQLNKASEFTGLMDNMRYLYDDKHVSETNIKSQEKFLQHDLLFKINGSKILKTEFNNKSLSDKYKNKNVDLFGTNYYNQCYFSSDNMELNDGRLIEKTCMYGGVTEHDGNQIDKNNSTDNSHNILIKVYENERNSLSFDIPTNKKNITAQEIDYKVRNYLLKHKNLYEFNSSPYETGYIKFIEGSGHSFWYDLMPESGKKFYPTKYLLIYNDNKTVESKSINVEVHLTKK

SEQ ID NO: 5511 - DNA, 372 bp, Staphylococcus aureus
atgatacctaaatatcgagtgtgggacgaatatacgggaagaatacacgatgttgtaggattcgacttcattgagagtgaagttcactatgaaaactacgcggaagcagaagctttaatacatgcaagagatttcaaagatgtagaacttatgcaaaacacaggatttaaagatgtgcacggtgtggagatttatgaaggggatattgttcaagattgtgattcgagagaagtaagttttatcgagtttaaagaaggagccttttatataacttttagcaatgtaactgaattactaagtgaaaatgacgatattattgaaattgttggaaatatttttgaaaatgagatgctattggaggttatgagatga

SEQ ID NO: 5512 - protein, 123 aa, Staphylococcus aureus
MIPKYRVWDEYTGRIHDVVGFDFIESEVHYENYAEAEALIHARDFKDVELMQNTGFKDVHGVEIYEGDIVQDCDSREVSFIEFKEGAFYITFSNVTELLSENDDIIEIVGNIFENEMLLEVMR

SEQ ID NO: 5513 - DNA, 402 bp, Staphylococcus aureus
atgaaaattaaagttaaaaaagaaatgaaattagatgaattaattaaatgggctcgagaaaatccggagctatcacaaggaaaagtttttgttacaaagagttttgctgatggaatcgttcgttttgattcatatacaaataagtgtacgacatcaggttttgctccaattgatatccctttcatagtcgaagttgaaaaggaaatcacagaagagactaagtttgataggttgtttgaagtattcgaggtctcagaagtagaatataactctgcattatatacgaacactagtataaaagaatgtttatatggcagatgtgtgcctaccaaagcgttctacatcttgaacgacgacttcactttaactttaatttggaaagatggagggctaatcgaatga

SEQ ID NO: 5514 - protein, 133 aa, Staphylococcus aureus
MKIKVKKEMKLDELIKWARENPELSQGKVFVTKSFADGIVRFDSYTNKCTTSGFAPIDIPFIVEVEKEITEETKFDRLFEVFEVSEVEYNSALYTNTSIKECLYGRCVPTKAFYILNDDFTLTLIWKDGGLIE

SEQ ID NO: 5515 - DNA, 1017 bp, Staphylococcus aureus
atggagaaaattgagaatgaaatagttaataagacatatcttgcaattaattctttggaagaattaagaaatatgattggtattaaatcagactatttttataaatgtctttatgtgaatgaccatttttataatgttatcaaaatacctaaacgaaaaaaagatgaatatagagaattgatgattcctaatatggctctcaaaaatatccaaaggtggattttagataatgtattgtacagaaggcaagttcataaatgtgcaactggttttgttcctaggaaatcaatagtgaacaatgcaatcccacacgttgggcagaaatatatattgaaaatggatatagaaaacttttttccgagtatcacatttaagcaggttagaaaaatattttctgagatgggctataaatttgaacttgcgacagcactcgcaaatttgtgtacagtgaataatcagttgcctcaaggtgcaccaaccagtccatatatagctaatatcatcttttacaatatagataaaagaatcttttcttattgtcaaaaaaataatttgagatatactcgatatgctgatgatattactatttctggatctaataaagtaagttttagtaaagaaattatcagggaaatagtaaaccaatataattttagaattaatgaaagtaagacaattatgtttaaaccaggagacagaaaaaaagttactggtattatagttaatgaaaaaatatcggttcctaaaactttaataagagaggtcaggaagcaaatttattttgtaaataagtttggattagaagaacacttaattcgaaataattattcattggattatgagcagcaatttattatgagtatatatggaaaaatcagttttattaaaatgattgatttcaagaaaggcgttagtttacaaaagaaatttaatgaagtactaggtaatatagaatcgtctaacatgtacagagataatattgactttgatgatatagaactacattggataaattaa

SEQ ID NO: 5516 - protein, 338 aa, Staphylococcus aureus
MEKIENEIVNKTYLAINSLEELRNMIGIKSDYFYKCLYVNDHFYNVIKIPKRKKDEYRELMIPNMALKNIQRWILDNVLYRRQVHKCATGFVPRKSIVNNAIPHVGQKYILKMDIENFFPSITFKQVRKIFSEMGYKFELATALANLCTVNNQLPQGAPTSPYIANIIFYNIDKRIFSYCQKNNLRYTRYADDITISGSNKVSFSKEIIREIVNQYNFRINESKTIMFKPGDRKKVTGIIVNEKISVPKTLIREVRKQIYFVNKFGLEEHLIRNNYSLDYEQQFIMSIYGKISFIKMIDFKKGVSLQKKFNEVLGNIESSNMYRDNIDFDDIELHWIN

SEQ ID NO: 5517 - DNA, 720 bp, Staphylococcus aureus
atggagcataataacaatataaacaaaaaatacaaaaaattctcaaggggatctattatatatttagattttggcatcaatattgggcatgaattttctggcagacattttggaatagtattaaacaaaaatgatagtccatataattctttagtaacagttgtaccattaagttcaaaaaataaaaaacactatttaccattacaaaatattgtatttaaaacatcattatcaattttgaacaagacagttgataatatcgaatttgatttagacgttataaatcacgtaatttttacggttatagaaattattaataaaaataatttacaaaacactttggaacaaaacactatagattatttagatgattttgcaattaaaacacgcttccctacagaaagagaagtaattaataaaagtaaaaacatagtagaatcatttaatttatacaatgacccgaaaaatttttctgctttgtttaattatttgctaattgatgtaaacgatagaaaatcaaaagttaataaccttagagaagttattaataaatataaaaaatttgataaaaatacatttgcctgcacacagaatgtagtaactattagcaaattaagaattttaaaaattaacgctgaagatccttctggtagaatgaaactcgattttgatagtatgaaattagtagataatgaaattaaaaataagctaatcaattag

SEQ ID NO: 5518 - protein, 239 aa, Staphylococcus aureus
MEHNNNINKKYKKFSRGSIIYLDFGINIGHEFSGRHFGIVLNKNDSPYNSLVTVVPLSSKNKKHYLPLQNIVFKTSLSILNKTVDNIEFDLDVINHVIFTVIEIINKNNLQNTLEQNTIDYLDDFAIKTRFPTEREVINKSKNIVESFNLYNDPKNFSALFNYLLIDVNDRKSKVNNLREVINKYKKFDKNTFACTQNVVTISKLRILKINAEDPSGRMKLDFDSMKLVDNEIKNKLIN

SEQ ID NO: 5519 - DNA, 513 bp, Staphylococcus aureus
atgaaacagcaaatgttatcaaaagtattattaagtacagtcgtagttatgggatcaatagcaggatcttctcttgtaatggatgacaacgctcatgctgaacaaaaaagtgataatatcgggaaactgaatcaaaaaaatgaaagtaccttgcatctttcatttgaaaagggtattaaagggactgttgacaaaaatggtaagttaacattatctgatggaaaaacgtcaaaagtgatgccaactaatgctaaagataaaaaaggtaacgatgttgttttggtttataaaaaggttaaagatggatttgatgttcaagtaattaaatctagtcaagagagaaaaactaactgggttaaatgtggtctaggaacagttggaggcgctggcactggtgggctaggcggtgctagtgcagcttcagttataccaggtttaggaactgttgcaggtgctattattggtggggtttctggtggtgccacaggtgccgcagcgtcatgtttcggttga

SEQ ID NO: 5520 - protein, 170 aa, Staphylococcus aureus
MKQQMLSKVLLSTVVVMGSIAGSSLVMDDNAHAEQKSDNIGKLNQKNESTLHLSFEKGIKGTVDKNGKLTLSDGKTSKVMPTNAKDKKGNDVVLVYKKVKDGFDVQVIKSSQERKTNWVKCGLGTVGGAGTGGLGGASAASVIPGLGTVAGAIIGGVSGGATGAAASCFG

SEQ ID NO: 5521 - DNA, 705 bp, Staphylococcus aureus
atgaataaaaaattactaatgaatttttttatcgtaagccctttgttgcttgcgacaatcgctacagattttacccctgttcccttattatctaatcaaataatcaaaactgcaaaagcatctacaaacgataatataaaggatttgctagactggtatagtagtgggtctgacacttttacaaatagtgaagttttagataattccttaggatctatgcgtataaaaaacacagatggcagcatcagccttataatttttccgagtccttattatagccctgcttttacaaaaggggaaaaagttgacttaaacacaaaaagaactaaaaaaagccaacatactagcgaaggaacttatatccatttccaaataagtggcgttacaaatactgaaaaattacctactccaatagaactacctttaaaagttaaggttcatggtaaagatagccccttaaagtattggccaaagttcgataaaaaacaattagctatatcaactttagactttgaaattcgtcatcagctaactcaaatacatggattatatcgttcaagcgataaaacgggtggttattggaaaataacaatgaatgacggatccacatatcaaagtgatttatctaaaaagtttgaatacaatactgaaaaaccacctataaatattgatgaaataaaaactatagaagcagaaattaattaa

SEQ ID NO: 5522 - protein, 234 aa, Staphylococcus aureus
MNKKLLMNFFIVSPLLLATIATDFTPVPLLSNQIIKTAKASTNDNIKDLLDWYSSGSDTFTNSEVLDNSLGSMRIKNTDGSISLIIFPSPYYSPAFTKGEKVDLNTKRTKKSQHTSEGTYIHFQISGVTNTEKLPTPIELPLKVKVHGKDSPLKYWPKFDKKQLAISTLDFEIRHQLTQIHGLYRSSDKTGGYWKITMNDGSTYQSDLSKKFEYNTEKPPINIDEIKTIEAEIN

SEQ ID NO: 5523 - DNA, 936 bp, Staphylococcus aureus
atgagacttcaaaaagcacctttagtaacatcgggattgatcttaggtttgttggggttgggcaatctcttgaaagacatatcacttgttttaaatgctatttgtggtatctttgccctctttatttgggttcaccttttatgtactattctcaataattttaaaaatgttaaagaacaattgaatacccctctagtttcatctgtgttcacaacatttttcatgtctggatttttgggaaccacttatttaaatacgtattttagtgatgtaaccattatcactagcttaataacacccttatggctcttatgtcttatggggattatgatacatatgattattttttcaattaaatatttaaaagggttctcgctcgaaaatgtttatccatcatggacagtgctttatattggtattgctattgctggattaacagcaccaatcagcggattttatttaattggaaaattatcagttatatatggttttttagcaacatgtattgtcttaccaatagtattcaaacgattaaaaacgtatccattgcaaacgtctattaaaccgaacacttccacaatttgtgcaccattttctttagttgctgcggcatatgttataacttttcctaaggcaaatgatctaatcgttattattcttttggtattggctcagtttttttatttttatattatatttaaacttccaaagttgctaaaagagccgttttcaccagtattttcagctttcacttttcctttagtaatttcagcaactgccttaaaaaatagtttacctgtactaacgtacccagaaatttgggaatggctcttattttttgaaattacattagcaactttaatagtattaagagtctttttaggctatgttcatttcttttttaaaactagcccgaaggctagctataactcttaa

SEQ ID NO: 5524 - protein, 311 aa, Staphylococcus aureus
MRLQKAPLVTSGLILGLLGLGNLLKDISLVLNAICGIFALFIWVHLLCTILNNFKNVKEQLNTPLVSSVFTTFFMSGFLGTTYLNTYFSDVTIITSLITPLWLLCLMGIMIHMIIFSIKYLKGFSLENVYPSWTVLYIGIAIAGLTAPISGFYLIGKLSVIYGFLATCIVLPIVFKRLKTYPLQTSIKPNTSTICAPFSLVAAAYVITFPKANDLIVIILLVLAQFFYFYIIFKLPKLLKEPFSPVFSAFTFPLVISATALKNSLPVLTYPEIWEWLLFFEITLATLIVLRVFLGYVHFFFKTSPKASYNS

SEQ ID NO: 5525 - DNA, 1002 bp, Staphylococcus aureus
gtgaaattgacggctgtgcatttttataaatatagtgaaccatttaagtctaaaattgtaactccgaaagtcactttaactcatcgtgattgtttgtttattgaaataattgatgataaaggcaatgcatatttcggggaatgtaacgcttttcaaacagattggtatgattttgaaacgattgattcagtaaaagaagcacttcaacaatggttcatagatattaaaaataaatcattcgaatcgtatgaagcggcacttgagttattgtcacctttggaagatactcctgctgcaagagcaactgttgtcatggcattgtatcaaatgtttcacactttaccgtcattttcagtagcatatggtgcgacagtaagtgggttatctaacaaacaactagctgccttgaaagaaacaaaacctgccagaattaaattaaaatggacgcctcaaattatagatcaaataaaatcgttacgtgagttaaactttcagtttcaattagttatagatgcaaatgagtcattgacccgtcaagacatgacacagttacaattattagcagatgaaaatatactttatatcgaagagccatttaaagaaatttcaatgattgatgaagtagtggctgaaaaaactcctccaatcgctcttgatgaaaaggcgacgtcactgtcggccataattaatttgatagaattatacaatgtgaaagttgttgtattaaaaccatttcgtctaggtggcattgataaagtgcaaacggcaattgatactttaaaaagtcatggtgtaaaagtggtaattggcggcatgtacgaatatggtttaagccgttattttacagcgatgcttgctcgtaaaggtgattatccaggagatgttacaccagcaggttattattttgaacaagatgtggtggcgcattcaggcatattaaaagaggggcgactcgaatttcgcccccctttagtagatataactcaattacaaccatattaa

SEQ ID NO: 5526 - protein, 333 aa, Staphylococcus aureus
MKLTAVHFYKYSEPFKSKIVTPKVTLTHRDCLFIEIIDDKGNAYFGECNAFQTDWYDFETIDSVKEALQQWFIDIKNKSFESYEAALELLSPLEDTPAARATVVMALYQMFHTLPSFSVAYGATVSGLSNKQLAALKETKPARIKLKWTPQIIDQIKSLRELNFQFQLVIDANESLTRQDMTQLQLLADENILYIEEPFKEISMIDEVVAEKTPPIALDEKATSLSAIINLIELYNVKVVVLKPFRLGGIDKVQTAIDTLKSHGVKVVIGGMYEYGLSRYFTAMLARKGDYPGDVTPAGYYFEQDVVAHSGILKEGRLEFRPPLVDITQLQPY

SEQ ID NO: 5527 - DNA, 1194 bp, Staphylococcus aureus
atgtataataatattataacaaaaaatgaaagcgataatagtatccctttaaattatggtgattttattaaagaaaaacgcaataaactcaacatgactcaaaaggaattagcagattctataggtttacctaaatttggcgatagaacaattcgcagatgggaaaattatgaaacatcaccttcatatctagaatataaaacaattatgaacttcccagataccccaccttatttaaatcctaatatttatgattataaaatgattgatctttttgctggtattggaggaacaagattaggatttcaattacatggcaatgttaaatgtgtttttagtagtgagtgggataaattttctgcaaaaacttacaaagcaaattttggtgaaactcccaaaggtgatataactcaaatcattgcagatgaaatacctacccatgatatattagttgctggatttccttgtcaagctttttcccaagcaggtttaaaaaaagggtttaacgacactagaggcactcttttctttgatattgcacgaattttaaaggcaaagagaccaaaatgttttttacttgaaaacgtaaaaaatttacgctcccatgataaaggaaaaaccttcgatattataatgaatactttgttagagttggattacgatgtatcatcatcaatacttagagcgagagattttggctgtccacaaaatagagaacgaatttatatagttggttttgataagcaacagattaaaaatgccgaaaatttttcattccctgaaccattaccaatagaaacttctttaggtagtatacttgaaagcaatgtaaatgataagtatacaatatcagatagactttggtatggtcatcaaagaagaaaaagagaacataaagctaaaggtaatggatttggatattcaatatttaatgagacaagcccttatacaaacaccttatctgcaagatattacaaagatggtagtgaaattttgattgagcaaaataaaaaaaatcccagaaaattaacacctcgagaagctgcacgactacaaggatttcctgaaaactatataattcctgtaagcgatactcaagcttataaacagtttggcaattctgtttctgtacccgttgtacacgctatagcttctaatattttccaagtcttacaacaaaataagaataattaa

SEQ ID NO: 5528 - protein, 397 aa, Staphylococcus aureus
MYNNIITKNESDNSIPLNYGDFIKEKRNKLNMTQKELADSIGLPKFGDRTIRRWENYETSPSYLEYKTIMNFPDTPPYLNPNIYDYKMIDLFAGIGGTRLGFQLHGNVKCVFSSEWDKFSAKTYKANFGETPKGDITQIIADEIPTHDILVAGFPCQAFSQAGLKKGFNDTRGTLFFDIARILKAKRPKCFLLENVKNLRSHDKGKTFDIIMNTLLELDYDVSSSILRARDFGCPQNRERIYIVGFDKQQIKNAENFSFPEPLPIETSLGSILESNVNDKYTISDRLWYGHQRRKREHKAKGNGFGYSIFNETSPYTNTLSARYYKDGSEILIEQNKKNPRKLTPREAARLQGFPENYIIPVSDTQAYKQFGNSVSVPVVHAIASNIFQVLQQNKNN

SEQ ID NO: 5529 - DNA, 927 bp, Staphylococcus aureus
gtggaaagacaacaaacttacaaagaaaaagcgcaacacctatataaagttaaaaaaatcaaaaatagatataatacgaaaagtgcagaagaatattttttctcgattcctcaagtaaaatacattctttcagcaggaagaatgaaaaaacataaagagaattataatgcttcagagataaaaataaaaaaagcagctttagaaaagagtaggaagaataagaattggaaaattgaagaacgtttaataaaagctaagagatatactcaaaaagttgatccagaatacttaaatatttatatgaaagcttatcataagaaagatataactacagaagaaaaactagaaattctaacggaattaaaaaaatttgatacagaaaatatagtgcgtttttttagaaaattaaatgatgctgaacaaaataaaatgattagaaatttagcctttaaatatttacaagattacggtcactatgtgaaactaaggaaaaattttaaaggaaagaagaaagtatatcaaactgagagagcttctttagacactaaaaaacctgaagatttatataatgatttaacaaataagaatattcaatctcaaaaagtctatgatatttttatttctcatagtacaaaagataagaagacagttgaagatattataagagtttttaatgaacaaaataaaacgtgttattgtgattggactatggatcaagattatttaaaaaggaagtatgttggtgaatatacaaagcaagtattgaaggctcgtatggagcaaagtaaaatgctggttttgttgagaacggagaattcagttcaatctgattgggttagttttgaaatagaatactttgaaaatctaaaaaaacctatatatatagtagagtctcttgaagaattattagaggctttttcagattag

SEQ ID NO: 5530 - protein, 308 aa, Staphylococcus aureus
MERQQTYKEKAQHLYKVKKIKNRYNTKSAEEYFFSIPQVKYILSAGRMKKHKENYNASEIKIKKAALEKSRKNKNWKIEERLIKAKRYTQKVDPEYLNIYMKAYHKKDITTEEKLEILTELKKFDTENIVRFFRKLNDAEQNKMIRNLAFKYLQDYGHYVKLRKNFKGKKKVYQTERASLDTKKPEDLYNDLTNKNIQSQKVYDIFISHSTKDKKTVEDIIRVFNEQNKTCYCDWTMDQDYLKRKYVGEYTKQVLKARMEQSKMLVLLRTENSVQSDWVSFEIEYFENLKKPIYIVESLEELLEAFSD

SEQ ID NO: 5531 - DNA, 291 bp, Staphylococcus aureus
atggtcatggaagaaaacgccttctacgatgccttagcttcacatgatacagctgagcatgttctaggtgatgatacattaaaaatcattgctcatgaactaactcagtctattaaagaaaatatgagtattgattggaacttatgcgaatcagcacgtgcaaaaatgcgagttatcgtaagacgcctattgaaaaagtacggatatccaccagaaatcagtaaacaagcagtagaaaccgtcattgaacaagcagagctgatgtcagagcagctggcgatggaattataa

SEQ ID NO: 5532 - protein, 96 aa, Staphylococcus aureus
MVMEENAFYDALASHDTAEHVLGDDTLKIIAHELTQSIKENMSIDWNLCESARAKMRVIVRRLLKKYGYPPEISKQAVETVIEQAELMSEQLAMEL

SEQ ID NO: 5533 - DNA, 735 bp, Staphylococcus aureus
atgaacaaaaaaaatataaaagatagtcaaaactttattacttcaaagtatcatataaatgaaattttgagaaatatacgtttaaatacaaatgataatattattgagattggttcagggaaaggtcatttcacgtttgaattagctaaaaggtgtaattatgtaaccgccattgaaatagaccctaaattatgtaggacaactaaaaacaaacttattgaatatgagaacttccaggttatcaataaagatattttacaatttaagtttcctaaaaataagtcatataagatatatggaaatataccctacaatataagtacagatataattcgaaaaattgtttttgaaagcacagctacagaaagttatttaatagtggaatatggatttgctaaaaggttgctaaatacaaatcgttcactagcactatttttaatgacagaagttgatatatccatattaagtaaaatccctagagaatactttcatccaaaacctagagttaatagctcgttaattgtattaaaaagacacccttcaaaaatatcactcaaagatagaaaacaatatgaaaattttgttatgaaatgggttaacaaagaatacatgaaactatttaccaaaaaccaattttatcaagccttaaaatatgcaagaattgacgatttaaacaatattagctttgaacaattcttgtctcttttcaatagctataaattattttatagataa

SEQ ID NO: 5534 - protein, 244 aa, Staphylococcus aureus
MNKKNIKDSQNFITSKYHINEILRNIRLNTNDNIIEIGSGKGHFTFELAKRCNYVTAIEIDPKLCRTTKNKLIEYENFQVINKDILQFKFPKNKSYKIYGNIPYNISTDIIRKIVFESTATESYLIVEYGFAKRLLNTNRSLALFLMTEVDISILSKIPREYFHPKPRVNSSLIVLKRHPSKISLKDRKQYENFVMKWVNKEYMKLFTKNQFYQALKYARIDDLNNISFEQFLSLFNSYKLFYR

SEQ ID NO: 5535 - DNA, 207 bp, Staphylococcus aureus
atgagtagtccgaaaattaagccctgccctttttgtggcggtctagcagatatacgatatagctttgatacattattaattgaatgtactaataaaaattgcaaactacaaccatctacatggtcacacgttcataccaataatgcagaaaaacttataaaaatttggaataaaagaaaagatttggaggaacaggaaaatgactaa

SEQ ID NO: 5536 - protein, 68 aa, Staphylococcus aureus
MSSPKIKPCPFCGGLADIRYSFDTLLIECTNKNCKLQPSTWSHVHTNNAEKLIKIWNKRKDLEEQEND

SEQ ID NO: 5537 - DNA, 663 bp, Staphylococcus aureus
ttgaatacaatagaatcacagtttgataaggttgcagaagattacgatttcgtgaatgagcttttgaatgattattcattctttgtgtctaatatgtctccaaagaaaggcagagcattagatatcggatgtggctcgggtttgttagtggagaaattagcaagttattatgatgaagtggtagggattgatatttctaatcaaatgctcgatcttgccaaatctaaacgtcaactaacaaatacggtctatctgaatatgaatgcagaacaacttaattttaatgagaagtttgattttattgtaagccgaacaacctttcatcatttggatgatatagccagcgtaatacagcaaatgaaggaactgttgaatgaggaaggaagaatagttattcttgataatgtatctgaagtcgagacaccgcctacctatgtttataaattaggggcaatccaagagtttttaccgcattgtttcaaatttggaataaaaaatgcgattagaatttataatcacaacacatctaaatcatggcttgagcatttagcttcagataagtacctatctgaacaaaattattacgatttatatgaaaagttgttgcctggatgccaattccataaaatgggttgggcaatgggggttgtctggacaaaataa

SEQ ID NO: 5538 - protein, 220 aa, Staphylococcus aureus
MNTIESQFDKVAEDYDFVNELLNDYSFFVSNMSPKKGRALDIGCGSGLLVEKLASYYDEVVGIDISNQMLDLAKSKRQLTNTVYLNMNAEQLNFNEKFDFIVSRTTFHHLDDIASVIQQMKELLNEEGRIVILDNVSEVETPPTYVYKLGAIQEFLPHCFKFGIKNAIRIYNHNTSKSWLEHLASDKYLSEQNYYDLYEKLLPGCQFHKMGWAMGVVWTK

SEQ ID NO: 5539 - DNA, 732 bp, Staphylococcus aureus
atgaaccagaaaaaccctaaagacacgcaaaattttattacttctaaaaagcatgtaaaagaaatattgaatcacacgaatatcagtaaacaagacaacgtaatagaaatcggatcaggaaaaggacattttaccaaagagctagtcaaaatgagtcgatcagttactgctatagaaattgatggaggcttatgtcaagtgactaaagaagcggtaaacccctctgagaatataaaagtgattcaaacggatattctaaaattttccttcccaaaacatataaactataagatatatggtaatattccttataacatcagtacggatattgtcaaaagaattacctttgaaagtcaggctaaatatagctatcttatcgttgagaagggatttgcgaaaagattgcaaaatctgcaacgagctttgggtttactattaatggtggagatggatataaaaatgctcaaaaaagtaccaccactatattttcatcctaagccaagtgtagactctgtattgattgttcttgagcgacatcaaccattgatttcaaagaaggactacaaaaagtatcgatcttttgtttataagtgggtaaaccgtgaatatcgtgttcttttcactaaaaaccaattccgacaggctttgaagcatgcaaatgtcactaatattaataaactatcgaaggaacaatttctttctattttcaatagttacaaattgtttcactaa

SEQ ID NO: 5540 - protein, 243 aa, Staphylococcus aureus
MNQKNPKDTQNFITSKKHVKEILNHTNISKQDNVIEIGSGKGHFTKELVKMSRSVTAIEIDGGLCQVTKEAVNPSENIKVIQTDILKFSFPKHINYKIYGNIPYNISTDIVKRITFESQAKYSYLIVEKGFAKRLQNLQRALGLLLMVEMDIKMLKKVPPLYFHPKPSVDSVLIVLERHQPLISKKDYKKYRSFVYKWVNREYRVLFTKNQFRQALKHANVTNINKLSKEQFLSIFNSYKLFH

SEQ ID NO: 5541 - DNA, 783 bp, Staphylococcus aureus
atgagcaatttgattaacggaaaaataccaaatcaagcgattcaaacattaaaaatcgtaaaagatttatttggaagttcaatagttggagtatatctatttggttcagcagtaaatggtggtttacgcattaacagcgatgtagatgttctagtcgtcgtgaatcatagtttacctcaattaactcgaaaaaaactaacagaaagactaatgactatatcaggaaagattggaaatacggattctgttagaccacttgaagttacggttataaataggagtgaagttgtcccttggcaatatcctccaaaaagagaatttatatacggtgagtggctcaggggtgaatttgagaatggacaaattcaggaaccaagctatgatcctgatttggctattgttttagcacaagcaagaaagaatagtatttctctatttggtcctgattcttcaagtatacttgtctccgtacctttgacagatattcgaagagcaattaaggattctttgccagaactaattgaggggataaaaggtgatgagcgtaatgtaattttaaccctagctcgaatgtggcaaacagtgactactggtgaaattacctcgaaagatgtcgctgcagaatgggctatacctcttttacctaaagagcatgtaactttactggatatagctagaaaaggctatcggggagagtgtgatgataagtgggaaggactatattcaaaggtgaaagcactcgttaagtatatgaaaaattctatagaaacttctctcaattag

SEQ ID NO: 5542 - protein, 260 aa, Staphylococcus aureus
MSNLINGKIPNQAIQTLKIVKDLFGSSIVGVYLFGSAVNGGLRINSDVDVLVVVNHSLPQLTRKKLTERLMTISGKIGNTDSVRPLEVTVINRSEVVPWQYPPKREFIYGEWLRGEFENGQIQEPSYDPDLAIVLAQARKNSISLFGPDSSSILVSVPLTDIRRAIKDSLPELIEGIKGDERNVILTLARMWQTVTTGEITSKDVAAEWAIPLLPKEHVTLLDIARKGYRGECDDKWEGLYSKVKALVKYMKNSIETSLN

SEQ ID NO: 5543 - DNA, 504 bp, Staphylococcus aureus
atgaatacaatcaaaagtacgatacacacagaagctatatttagcgacgatgaacaacaccgctacttactcaagaaaatatgggatgaaaagaaaccctcttgtacagtgataacgatgtatccacatttagatggcgtattatcactcgatcttaccactgttctcattctcaaccaattagctaattctgaacaatacggtgctgtatatctagtaaatctattctctaatattaaaacacctgaaaaccttaaacatattaaagagccttatgacaaacacacagacattcacttaatgaaagcgattagtgaaagtgacacagtgattctagcctatggagcttatgcgaagcggcctgttgtcgtcgaacgtgttgagcaagtgatggaaatgttaaaacctcataaaaagaaagtcaaaaaactcattaatccagtaacgaacgaagttatgcatccacttaaccctaaagcacgtcaaaaatggacattaaaataa

SEQ ID NO: 5544 - protein, 167 aa, Staphylococcus aureus
MNTIKSTIHTEAIFSDDEQHRYLLKKIWDEKKPSCTVITMYPHLDGVLSLDLTTVLILNQLANSEQYGAVYLVNLFSNIKTPENLKHIKEPYDKHTDIHLMKAISESDTVILAYGAYAKRPVVVERVEQVMEMLKPHKKKVKKLINPVTNEVMHPLNPKARQKWTLK

SEQ ID NO: 5545 - DNA, 312 bp, Staphylococcus aureus
atgaaaatcaatcgatacatcacaagaggcataagtgaacaactatctctagaccttcaaatcctactttggaatatggtaaaagaaagagataatcaatctcatacagattatctacacatttttagactacaagaagatgagaatatactctcaatcacacatgaacaagaacaacctgcatacaaattggaatatcactatacaaactatgtaaaaaatcaaaatgcattacctaagaaagtctacgtcattcgtgaagatgacgtagacgctttttattatgtgatgcttttgccagaagaatattaa

SEQ ID NO: 5546 - protein, 103 aa, Staphylococcus aureus
MKINRYITRGISEQLSLDLQILLWNMVKERDNQSHTDYLHIFRLQEDENILSITHEQEQPAYKLEYHYTNYVKNQNALPKKVYVIREDDVDAFYYVMLLPEEY

SEQ ID NO: 5547 - DNA, 351 bp, Staphylococcus aureus
atgaaaacaaccactcaagaactcaaacaatatataactcgtctcttccaactatctaacaacgaaacatgggaatgtgaagcacttgaggaagcagcagaaaatattctaccggaacgttttattaataattctctacttgcgcatctcacactcaacacttatacctactacaatgatgagctacatgagctaagtatctatccatttcttatgtacgccaatgaccaactcatcagcattggttatttggatcattttgatatggactttctatacctcacagatactaaaaatacgattatcgatgaacgtcatttactaaaacaaggagagaataaccatgaataa

SEQ ID NO: 5548 - protein, 116 aa, Staphylococcus aureus
MKTTTQELKQYITRLFQLSNNETWECEALEEAAENILPERFINNSLLAHLTLNTYTYYNDELHELSIYPFLMYANDQLISIGYLDHFDMDFLYLTDTKNTIIDERHLLKQGENNHE

SEQ ID NO: 5549 - DNA, 144 bp, Staphylococcus aureus
atgaaagaaatgaaaagaaaatctgtaggatgttatgttagagtttcaacaatttctcaagacattgataaatttagtattaatggtcaaattacacaaataaaggaatattgccaacagggaaattatgaattgctatactga

SEQ ID NO: 5550 - protein, 47 aa, Staphylococcus aureus
MKEMKRKSVGCYVRVSTISQDIDKFSINGQITQIKEYCQQGNYELLY

SEQ ID NO: 5551 - DNA, 1926 bp, Staphylococcus aureus
atgaaaaatattcaagagcaacaagcacacgaaagtcatagccacgatcatagtcatgatcatgatcacggaaaaatgccaattatttcatattttattggcttagtgttggctataattgggctttttttaagtgatgcaaatttattaatacaaaacatcttattttcaattgccacaatcacagccggctaccatgtaattattctcgaaggaattggagagacagttgaaaatactaaattaaagggaaaattcactcctaattctcatattctaatgggattagctgcaatcggggcttctctgatagggagtttttgggaaggaacccttttgatacttattttttccggcgctcattttcttgaagattacgctgaaggaaaaagtaaaagagaaattactaagctactcgaaatgaacccaacgacagctaaattaatcctacctgatggaaacacaaaaattgttgatgtcagtgaattaaaagttggagatcaactccaagtgctgaacggtgatcaagttccaattgatgggattattttatccggtactacctcaattgatgaatcttctattaatggagaaagtataccgaaagagaagtctaagggtgacgaagtttttggaagtacgattaatggaacaggtacttttactatggaagtcactaaggaaaacaaggatactgtattctctaaaattttacaattagttagtcaaaaccaagataatcaaacaaaagctgccagtatcattcaaaaattcgagcctaaatatgttaatatagttttaatcgcaataccattagtaatgttacttgctccttttctatttgattggacatggtcgcaaagtgtatacaggggattagtgcttttagtcgcagcttcaccgtgtgctttggcagcagctactgtatctgtaacattgtctacaacatctaacctagctaaaaaaggcgtgctttcaaaaggaagtacttacctatcacaattagcggatatagatgcaattgccttcgataaaacaggaacccttacgaacggagaacctaaagtaacaaattactatttcactcattctgtgaacgaagaaaatattattgatattatagtcgcccttgaaaaggaatccaatcacccactcgctaatgctattttagaaaaatttgaagttaaaaataaaatagacatcgaagttactaatcaaattggaaaaggtctgacaggagattataatggaaaaaattatcgtattggtaagcctacttcttttgaaagtgcttctgaagagtatacccagttcaatcatgattgggcatcagaaggaaagacggttgtatacgtagcagaaaatgaagaagttattgggattatagctctaatggatattccgaatgagcatgctaaagaaacaattaattactttaagaaacttggtatccacacgactttaattactggtgattcggaaatgacgggaaaagctgtaggcgaacaattgggaatagacgaagttatcgctaatgtaatgcctgaagataaatccagaattatagaagaacaaaaagaaaaatttggagttactgccatggttggagatggtgtgaacgatgcaccggcccttgttaatgctgatgttggtatagctatggggggcggtactgatgtggcagtagaagtatctgatttggttttaatgcagaacaatttatctaaattagtacagtctcataaaatttcctcaaatatgggtcgtgttattaggcaaaatattattttttcaatggcagttgttgcctttttagttgtcgttagtttgttaggattaactgatattacaatcagtgtaattgttcatgaaggaagtactttagttgttatactaaatggacttcgattattaagatctaaataa

SEQ ID NO: 5552 - protein, 641 aa, Staphylococcus aureus
MKNIQEQQAHESHSHDHSHDHDHGKMPIISYFIGLVLAIIGLFLSDANLLIQNILFSIATITAGYHVIILEGIGETVENTKLKGKFTPNSHILMGLAAIGASLIGSFWEGTLLILIFSGAHFLEDYAEGKSKREITKLLEMNPTTAKLILPDGNTKIVDVSELKVGDQLQVLNGDQVPIDGIILSGTTSIDESSINGESIPKEKSKGDEVFGSTINGTGTFTMEVTKENKDTVFSKILQLVSQNQDNQTKAASIIQKFEPKYVNIVLIAIPLVMLLAPFLFDWTWSQSVYRGLVLLVAASPCALAAATVSVTLSTTSNLAKKGVLSKGSTYLSQLADIDAIAFDKTGTLTNGEPKVTNYYFTHSVNEENIIDIIVALEKESNHPLANAILEKFEVKNKIDIEVTNQIGKGLTGDYNGKNYRIGKPTSFESASEEYTQFNHDWASEGKTVVYVAENEEVIGIIALMDIPNEHAKETINYFKKLGIHTTLITGDSEMTGKAVGEQLGIDEVIANVMPEDKSRIIEEQKEKFGVTAMVGDGVNDAPALVNADVGIAMGGGTDVAVEVSDLVLMQNNLSKLVQSHKISSNMGRVIRQNIIFSMAVVAFLVVVSLLGLTDITISVIVHEGSTLVVILNGLRLLRSK

SEQ ID NO: 5553 - DNA, 663 bp, Staphylococcus aureus
atgaatcaagaaggaacattagggaatgcaataaagagcgctagaaaaaagtatccgttaacactagaagaattaggcggaaaagttggagttagccacgctttcttatcacgcgttgaaaataataaaattacaccaaatgataaattacttgtcaaaatcgctaatgtattagattttaatgaaagtcaagattttttaaatgaatttagaatattagcaggatattacgataatatagatgaaaatactgctatttttaacaacttaaaatcaagtggtagattagaaataaatagatttaaaagagaaaagaagattgttgataaaccatactataaactaaattatttattcgaatgcgaaaacaaagttttctatgatataaaaacatctgaacttggcgaaaagcttgtaactattgaattaccatctgatattcttcacgatatttataaaatgataaacttagaaattataaaaaccattaaaataaattctaaacttctttatagcattgaaaaccctcaagtaattgaggagtatcaaaaagaagtggaaaaaactagaaaagaattcactgaacgtcttgaaaaatcgctctcaacttatgatattgatagtgtaatacgtgaaatatatgacgatgaatatctaatataa

SEQ ID NO: 5554 - protein, 220 aa, Staphylococcus aureus
MNQEGTLGNAIKSARKKYPLTLEELGGKVGVSHAFLSRVENNKITPNDKLLVKIANVLDFNESQDFLNEFRILAGYYDNIDENTAIFNNLKSSGRLEINRFKREKKIVDKPYYKLNYLFECENKVFYDIKTSELGEKLVTIELPSDILHDIYKMINLEIIKTIKINSKLLYSIENPQVIEEYQKEVEKTRKEFTERLEKSLSTYDIDSVIREIYDDEYLI

SEQ ID NO: 5555 - DNA, 213 bp, Staphylococcus aureus
atggaaacaaaagttcttgaattacgtggtttaatagcaaaaaatgggcatactttgcgtagttttgccaaagatagcaatatttcgctttcttatttaagtttgatagtgaataaaaaggctgaacctagtccgaaaatggcaaagaaaatagcggataatttaaatgttgatatggaagagcttttcgtatacagaacaaaggaggcataa

SEQ ID NO: 5556 - protein, 70 aa, Staphylococcus aureus
METKVLELRGLIAKNGHTLRSFAKDSNISLSYLSLIVNKKAEPSPKMAKKIADNLNVDMEELFVYRTKEA

SEQ ID NO: 5557 - DNA, 150 bp, Staphylococcus aureus
atgaaattggatttactttatataaccttaacatcgttgttaacaatcttattactagcaatatctaatatgtacattgcttttagtgtatacggcatgttaataacactaggcttttacttaacaggaggattagaaaatgaaaaatga

SEQ ID NO: 5558 - protein, 49 aa, Staphylococcus aureus
MKLDLLYITLTSLLTILLLAISNMYIAFSVYGMLITLGFYLTGGLENEK

SEQ ID NO: 5559 - DNA, 195 bp, Staphylococcus aureus
gtggctaaaaaagtgaagctaagcaaccaacaagcgcatagatttatgaaagttagtgaagagtacgaaggttcaaatttaacgacgtcgttaaatttagggttaaatgttttgtatcaaatcgcaactcttcctgagccagaacgcagcaaagaacacataacatcaaatggtgaaactaaaattccatactaa

SEQ ID NO: 5560 - protein, 64 aa, Staphylococcus aureus
MAKKVKLSNQQAHRFMKVSEEYEGSNLTTSLNLGLNVLYQIATLPEPERSKEHITSNGETKIPY

SEQ ID NO: 5561 - DNA, 372 bp, Staphylococcus aureus
atggataataaaacgtatgaaatatcatctgcagaatgggaagttatgaatatcatttggatgaaaaaatatgcaagtgcgaataatataatagaagaaatacaaatgcaaaaggactggagtccaaaaaccattcgtacacttataacgagattgtataaaaagggatttatagatcgtaaaaaagacaataaaatttttcaatattactctcttgtagaagaaagtgatataaaatataaaacatctaaaaactttatcaataaagtatacaaaggcggtttcaattcacttgtcttaaactttgtagaaaaagaagatctatcacaagatgaaatagaagaattgagaaatatattgaataaaaaataa

SEQ ID NO: 5562 - protein, 123 aa, Staphylococcus aureus
MDNKTYEISSAEWEVMNIIWMKKYASANNIIEEIQMQKDWSPKTIRTLITRLYKKGFIDRKKDNKIFQYYSLVEESDIKYKTSKNFINKVYKGGFNSLVLNFVEKEDLSQDEIEELRNILNKK

SEQ ID NO: 5563 - DNA, 1758 bp, Staphylococcus aureus
gtgttatcatcttttttaatgttaagtataatcagttcattgctcacgatatgtgtaatttttttagtgagaatgctctatataaaatatactcaaaatattatgtcacataagatttggttattagtgctcgtctccacgttaattccattaataccattttacaaaatatcgaattttacattttcaaaagatatgatgaatcgaaatgtatctgacacgacttcttcggttagtcatatgttagatggtcaacaatcatctgttacgaaagacttagcaattaatgttaatcagtttgagacctcaaatataacgtatatgattcttttgatatgggtatttggtagtttgttgtgcttattttatatgattaaggcattccgacaaattgatgttattaaaagttcgtcattggaatcgtcatatcttaatgaacgacttaaagtatgtcaaagtaagatgcagttctacaaaaagcatataacaattagttatagttcaaacattgataatccgatggtatttggtttagtgaaatcccaaattgtactaccaactgtcgtagtcgaaaccatgaatgacaaagaaattgaatatattattctacatgaactatcacatgtgaaaagtcatgacttaatattcaaccagctttatgttgtttttaaaatgatattctggtttaatcctgcactatatataagtaaaacaatgatggacaatgactgtgaaaaagtatgtgatagaaacgttttaaaaattttgaatcgccatgaacatatacgttatggtgaatcgatattaaaatgctctattttaaaatctcagcacataaataatgtggcagcacaatatttactaggttttaattcaaatattaaagaacgtgttaagtatattgcactttatgattcaatgcctaaacctaatcgaaacaagcgtattgttgcgtatattgtatgtagtatatcgcttttaatacaagcaccgttactatctgcacatgttcaacaagacaaatatgaaacaaatgtatcatataaaaaattaaatcaactagctccgtatttcaaaggatttgatggaagttttgtgctttataatgaacgggagcaagcttattctatttataatgaaccagaaagtaaacaacgatattcacctaattctacttacaaaatttatttagcgttaatggcattcgaccaaaatttactctcattaaatcatactgaacaacaatgggataaacatcaatatccatttaaagaatggaaccaagatcaaaatttaaattcttcaatgaaatattcagtaaattggtattacgaaaatttaaacaaacatttaagacaagatgaggttaaatcttatttagatctaattgaatatggtaatgaagaaatatcagggaatgaaaattattggaatgaatcttcattaaaaatttctgcaatagaacaggttaatttgttgaaaaatatgaaacaacataacatgcattttgataataaggctattgaaaaagttgaaaatagtatgactttgaaacaaaaagatacttataaatatgtaggtaaaactggaacaggaatcgtgaatcacaaagaagcaaatggatggttcgtaggttatgttgaaacgaaagataatacgtattattttgctacacatttaaaaggcgaagacaatgcgaatggcgaaaaagcacaacaaatttctgagcgtattttaaaagaaatggaattaatataa

SEQ ID NO: 5564 - protein, 585 aa, Staphylococcus aureus
MLSSFLMLSIISSLLTICVIFLVRMLYIKYTQNIMSHKIWLLVLVSTLIPLIPFYKISNFTFSKDMMNRNVSDTTSSVSHMLDGQQSSVTKDLAINVNQFETSNITYMILLIWVFGSLLCLFYMIKAFRQIDVIKSSSLESSYLNERLKVCQSKMQFYKKHITISYSSNIDNPMVFGLVKSQIVLPTVVVETMNDKEIEYIILHELSHVKSHDLIFNQLYVVFKMIFWFNPALYISKTMMDNDCEKVCDRNVLKILNRHEHIRYGESILKCSILKSQHINNVAAQYLLGFNSNIKERVKYIALYDSMPKPNRNKRIVAYIVCSISLLIQAPLLSAHVQQDKYETNVSYKKLNQLAPYFKGFDGSFVLYNEREQAYSIYNEPESKQRYSPNSTYKIYLALMAFDQNLLSLNHTEQQWDKHQYPFKEWNQDQNLNSSMKYSVNWYYENLNKHLRQDEVKSYLDLIEYGNEEISGNENYWNESSLKISAIEQVNLLKNMKQHNMHFDNKAIEKVENSMTLKQKDTYKYVGKTGTGIVNHKEANGWFVGYVETKDNTYYFATHLKGEDNANGEKAQQISERILKEMELI

SEQ ID NO: 5565 - DNA, 2007 bp, Staphylococcus aureus
atgaaaaagataaaaattgttccacttattttaatagttgtagttgtcgggtttggtatatatttttatgcttcaaaagataaagaaattaataatactattgatgcaattgaagataaaaatttcaaacaagtttataaagatagcagttatatttctaaaagcgataatggtgaagtagaaatgactgaacgtccgataaaaatatataatagtttaggcgttaaagatataaacattcaggatcgtaaaataaaaaaagtatctaaaaataaaaaacgagtagatgctcaatataaaattaaaacaaactacggtaacattgatcgcaacgttcaatttaattttgttaaagaagatggtatgtggaagttagattgggatcatagcgtcattattccaggaatgcagaaagaccaaagcatacatattgaaaatttaaaatcagaacgtggtaaaattttagaccgaaacaatgtggaattggccaatacaggaacagcatatgagataggcatcgttccaaagaatgtatctaaaaaagattataaagcaatcgctaaagaactaagtatttctgaagactatatcaaacaacaaatggatcaaaattgggtacaagatgataccttcgttccacttaaaaccgttaaaaaaatggatgaatatttaagtgatttcgcaaaaaaatttcatcttacaactaatgaaacagaaagtcgtaactatcctctaggaaaagcgacttcacatctattaggttatgttggtcccattaactctgaagaattaaaacaaaaagaatataaaggctataaagatgatgcagttattggtaaaaagggactcgaaaaactttacgataaaaagctccaacatgaagatggctatcgtgtcacaatcgttgacgataatagcaatacaatcgcacatacattaatagagaaaaagaaaaaagatggcaaagatattcaactaactattgatgctaaagttcaaaagagtatttataacaacatgaaaaatgattatggctcaggtactgctatccaccctcaaacaggtgaattattagcacttgtaagcacaccttcatatgacgtctatccatttatgtatggcatgagtaacgaagaatataataaattaaccgaagataaaaaagaacctctgctcaacaagttccagattacaacttcaccaggttcaactcaaaaaatattaacagcaatgattgggttaaataacaaaacattagacgataaaacaagttataaaatcgatggtaaaggttggcaaaaagataaatcttggggtggttacaacgttacaagatatgaagtggtaaatggtaatatcgacttaaaacaagcaatagaatcatcagataacattttctttgctagagtagcactcgaattaggcagtaagaaatttgaaaaaggcatgaaaaaactaggtgttggtgaagatataccaagtgattatccattttataatgctcaaatttcaaacaaaaatttagataatgaaatattattagctgattcaggttacggacaaggtgaaatactgattaacccagtacagatcctttcaatctatagcgcattagaaaataatggcaatattaacgcacctcacttattaaaagacacgaaaaacaaagtttggaagaaaaatattatttccaaagaaaatatcaatctattaactgatggtatgcaacaagtcgtaaataaaacacataaagaagatatttatagatcttatgcaaacttaattggcaaatccggtactgcagaactcaaaatgaaacaaggagaaactggcagacaaattgggtggtttatatcatatgataaagataatccaaacatgatgatggctattaatgttaaagatgtacaagataaaggaatggctagctacaatgccaaaatctcaggtaaagtgtatgatgagctatatgagaacggtaataaaaaatacgatatagatgaataa

SEQ ID NO: 5566 - protein, 668 aa, Staphylococcus aureus
MKKIKIVPLILIVVVVGFGIYFYASKDKEINNTIDAIEDKNFKQVYKDSSYISKSDNGEVEMTERPIKIYNSLGVKDINIQDRKIKKVSKNKKRVDAQYKIKTNYGNIDRNVQFNFVKEDGMWKLDWDHSVIIPGMQKDQSIHIENLKSERGKILDRNNVELANTGTAYEIGIVPKNVSKKDYKAIAKELSISEDYIKQQMDQNWVQDDTFVPLKTVKKMDEYLSDFAKKFHLTTNETESRNYPLGKATSHLLGYVGPINSEELKQKEYKGYKDDAVIGKKGLEKLYDKKLQHEDGYRVTIVDDNSNTIAHTLIEKKKKDGKDIQLTIDAKVQKSIYNNMKNDYGSGTAIHPQTGELLALVSTPSYDVYPFMYGMSNEEYNKLTEDKKEPLLNKFQITTSPGSTQKILTAMIGLNNKTLDDKTSYKIDGKGWQKDKSWGGYNVTRYEVVNGNIDLKQAIESSDNIFFARVALELGSKKFEKGMKKLGVGEDIPSDYPFYNAQISNKNLDNEILLADSGYGQGEILINPVQILSIYSALENNGNINAPHLLKDTKNKVWKKNIISKENINLLTDGMQQVVNKTHKEDIYRSYANLIGKSGTAELKMKQGETGRQIGWFISYDKDNPNMMMAINVKDVQDKGMASYNAKISGKVYDELYENGNKKYDIDE

SEQ ID NO: 5567 - DNA, 429 bp, Staphylococcus aureus
atgaaatacgatgattttatagtaggagaaacattcaaaacaaaaagccttcatattacagaagaagaaattatccaatttgcaacaacttttgatcctcaatatatgcatatagataaagaaaaagcagaacaaagtagatttaaaggtatcattgcatctggcatgcatacactttcaatatcatttaaattatgggtagaagaaggtaaatacggagaagaagttgtagcaggaacacaaatgaataacgttaaatttattaaacctgtatacccaggtaatacattgtacgttatcgctgaaattacaaataagaaatccataaaaaaagaaaatggactcgttacagtgtcactttcaacatacaatgaaaatgaagaaattgtatttaagggagaagtaacagcacttattaataattcataa

SEQ ID NO: 5568 - protein, 142 aa, Staphylococcus aureus
MKYDDFIVGETFKTKSLHITEEEIIQFATTFDPQYMHIDKEKAEQSRFKGIIASGMHTLSISFKLWVEEGKYGEEVVAGTQMNNVKFIKPVYPGNTLYVIAEITNKKSIKKENGLVTVSLSTYNENEEIVFKGEVTALINNS

SEQ ID NO: 5569 - DNA, 744 bp, Staphylococcus aureus
atgctaactgtatatggacatagaggattacctagtaaagctccggaaaatacaattgcatcatttaaagctgcttcagaagtagaaggtataaactggttggagttagatgttgcaattacaaaagatgaacaactgattatcattcatgatgattatttagaacggactacaaatatgtccggggaaataactgaattgaattatgatgaaattaaagatgcttctgcaggatcttggtttggtgaaaaattcaaagatgaacatttgccaactttcgatgatgtagtaaaaatagcaaatgaatataatatgaatttaaatgtagaattaaaaggtattactggaccgaatggactagcactttctaaaagtatggttaagcaagtggaagaacaattaacaaacttaaatcagaatcaagaagtgctcatttcaagctttaatgttgtgcttgttaaacttgcagaagaaatcatgccacaatataacagagcagttatattccatacaacttcgtttcgtgaagactggagaacacttttagattactgtaatgctaaaatagtaaacactgaagatgccaaacttactaaagcaaaagtaaaaatggtaaaagaagcgggttatgaattgaacgtatggactgtaaacaaaccagcacgtgcaaaccaacttgctaattggggagttgatggtatctttacagacaatgcagataaaatggtgcatttgtctcaatag

SEQ ID NO: 5570 - protein, 247 aa, Staphylococcus aureus
MLTVYGHRGLPSKAPENTIASFKAASEVEGINWLELDVAITKDEQLIIIHDDYLERTTNMSGEITELNYDEIKDASAGSWFGEKFKDEHLPTFDDVVKIANEYNMNLNVELKGITGPNGLALSKSMVKQVEEQLTNLNQNQEVLISSFNVVLVKLAEEIMPQYNRAVIFHTTSFREDWRTLLDYCNAKIVNTEDAKLTKAKVKMVKEAGYELNVWTVNKPARANQLANWGVDGIFTDNADKMVHLSQ

SEQ ID NO: 5571 - DNA, 744 bp, Staphylococcus aureus
atgactagagaagaaagaatgaagattgttcatgaaattaaggaacgaatattggataaatatggggatgatgttaaggctattggtgtttatggctctcttggtcgtcagactgatgggccctattcggatattgagatgatgtgtgtcatgtcaacagaggaagcagagttcagccatgaatggacaaccggtgagtggaaggtggaagtgaattttgatagcgaagagattctactagattatgcatctcaggtggaatcagattggcctcttacacatggtcaatttttctctattttgccgatttatgattcaggtggatacttagagaaagtgtatcaaactgctaaatcggtagaagcccaaacgttccacgatgcgatttgtgcccttatcgtagaagagctgtttgaatatgcaggcaaatggcgtaatattcgtgtgcaaggaccgacaacatttctaccatccttgactgtacaggtagcaatggcaggtgccatgttgattggtctgcatcatcgcatctgttatacgacgagcgcttcggtcttaactgaagcagttaagcaatcagatcttccttcaggttatgaccatctgtgccagttcgtaatgtctggtcaactttccgactctgagaaacttctggaatcgctagagaatttctggaatgggattcaggagtggacagaacgacacggatatatagtggatgtgtcaaaacgcataccattttga

SEQ ID NO: 5572 - protein, 247 aa, Staphylococcus aureus
MTREERMKIVHEIKERILDKYGDDVKAIGVYGSLGRQTDGPYSDIEMMCVMSTEEAEFSHEWTTGEWKVEVNFDSEEILLDYASQVESDWPLTHGQFFSILPIYDSGGYLEKVYQTAKSVEAQTFHDAICALIVEELFEYAGKWRNIRVQGPTTFLPSLTVQVAMAGAMLIGLHHRICYTTSASVLTEAVKQSDLPSGYDHLCQFVMSGQLSDSEKLLESLENFWNGIQEWTERHGYIVDVSKRIPF

SEQ ID NO: 5573 - DNA, 405 bp, Staphylococcus aureus
gtgagaatgttacagtctatcccggcattgccagtcggggatattaaaaagagtataggtttttattgcgataaactaggtttcactttggttcaccatgaagatggattcgcagttctaatgtgtaatgaggttcggattcatctatgggaggcaagtgatgaaggctggcgctctcgtagtaatgattcaccggtttgtacaggtgcggagtcgtttattgctggtactgctagttgccgcattgaagtagagggaattgatgaattatatcaacatattaagcctttgggcattttgcaccccaatacatcattaaaagatcagtggtgggatgaacgagactttgcagtaattgatcccgacaacaatttgattagcttttttcaacaaataaaaagctaa

SEQ ID NO: 5574 - protein, 134 aa, Staphylococcus aureus
MRMLQSIPALPVGDIKKSIGFYCDKLGFTLVHHEDGFAVLMCNEVRIHLWEASDEGWRSRSNDSPVCTGAESFIAGTASCRIEVEGIDELYQHIKPLGILHPNTSLKDQWWDERDFAVIDPDNNLISFFQQIKS

SEQ ID NO: 5575 - DNA, 774 bp, Staphylococcus aureus
atgtgtcctaatagtagcatttattcagatgaaaaatcaagggttttagtggacaagacaaaaagtggaaaagtgagaccatggagagaaaagaaaatcgctaatgttgattactttgaacttctgcatattcttgaatttaaaaaggctgaaagagtaaaagattgtgctgaaatattagagtataaacaaaatcgtgaaacaggcgaaagaaagttgtatcgagtgtggttttgtaaatccaggctttgtccaatgtgcaactggaggagagcaatgaaacatggcattcagtcacaaaaggttgttgctgaagttattaaacaaaagccaacagttcgttggttgtttctcacattaacagttaaaaatgtttatgatggcgaagaattaaataagagtttgtcagatatggctcaaggatttcgccgaatgatgcaatataaaaaaattaataaaaatcttgttggttttatgcgtgcaacggaagtgacaataaataataaagataattcttataatcagcacatgcatgtattggtatgtgtggaaccaacttattttaagaatacagaaaactacgtgaatcaaaaacaatggattcaattttggaaaaaggcaatgaaattagactatgatccaaatgtaaaagttcaaatgattcgaccgaaaaataaatataaatcggatatacaatcggcaattgacgaaactgcaaaatatcctgtaaaggatacggattttatgaccgatgatgaagaaaagaatttgtaa

SEQ ID NO: 5576 - protein, 257 aa, Staphylococcus aureus
MCPNSSIYSDEKSRVLVDKTKSGKVRPWREKKIANVDYFELLHILEFKKAERVKDCAEILEYKQNRETGERKLYRVWFCKSRLCPMCNWRRAMKHGIQSQKVVAEVIKQKPTVRWLFLTLTVKNVYDGEELNKSLSDMAQGFRRMMQYKKINKNLVGFMRATEVTINNKDNSYNQHMHVLVCVEPTYFKNTENYVNQKQWIQFWKKAMKLDYDPNVKVQMIRPKNKYKSDIQSAIDETAKYPVKDTDFMTDDEEKNL

SEQ ID NO: 5577 - DNA, 240 bp, Staphylococcus aureus
atgagtgataatttgtcattattcattgactatatcaatgataatataatctatggtagtgaaatcaaacgggagaaattagagaatttatttaatcaatttgctataaaaaatgttgaaaagaacattgtctatgatgaactgaaatctttagatattacaatcattgagtcacaggattcatataaaaataaattgaagagattattttcggttctgttgcaaagtaaaaaaatatag

SEQ ID NO: 5578 - protein, 79 aa, Staphylococcus aureus
MSDNLSLFIDYINDNIIYGSEIKREKLENLFNQFAIKNVEKNIVYDELKSLDITIIESQDSYKNKLKRLFSVLLQSKKI

SEQ ID NO: 5579 - DNA, 1257 bp, Staphylococcus aureus
atgatagacaactttatgcaggtccttaaattaattaaagagaaacgtaccaataatgtagttaaaaaatctgattgggataaaggtgatctatataaaactttagtccatgataagttacccaagcagttaaaagtgcatataaaagaagataaatattcagttgtagggaaggttgctactgggaactatagtaaagttccttggatttcaatatatgatgagaatataacaaaagaaacaaaggatggatattatttggtatatctttttcatccggaaggagaaggcatatacttatctttgaatcaaggatggtcaaagataagtgatatgtttccgcgggataaaaatgctgcaaaacaaagagcattaactttatcttccgaactcaataaatatattacatcaaatgaatttaatactggaagattttattacgcagaaaataaagattcatcttatgatttaaaaaatgattatccatcaggatattctcatggatcaataagattcaaatattatgatttgaatgaaggattcacagaagaagatatgctagaggatttaaagaaatttttagaactatttaatgaattagcttcaaaagttacaaaaacatcctatgatagcttggtcaatagcatagacgaaatacaggaagacagcgaaattgaagaaattagaacagcacaaaaagataagacactcaaggaagtggaagcacctaaaggaataattccaaaatataaaaaaggtgtatcaaagactactaaaaatgattcagaaattgaaaaatcaaataaagagaataaattaaccggtaaagttggagaaaaattagcgctaaattactttaatgagctaattgataataaaatagacgaagataagaaagaacagtttaggaatattttaaatgataatccaggctctcaacacggtcatggctatgatttagtagcttttgatccaacaaatacagataaagctgtagaaaaatttattgaaattaaaacatctacatcttctagtattgaggaaccattttttatgtcgctaaatgaaatgtttgctatgaaagaatataagcagaaatatttaatattaagaatatttaatgtttccggtaaagaaccacaattttattttatagatccatatgcaaattattctgaatttaaagatgtagatgatctcattgacaaagtatttaatgtagaagctattcagtataaagtttttggcgaaaaatga

SEQ ID NO: 5580 - protein, 418 aa, Staphylococcus aureus
MIDNFMQVLKLIKEKRTNNVVKKSDWDKGDLYKTLVHDKLPKQLKVHIKEDKYSVVGKVATGNYSKVPWISIYDENITKETKDGYYLVYLFHPEGEGIYLSLNQGWSKISDMFPRDKNAAKQRALTLSSELNKYITSNEFNTGRFYYAENKDSSYDLKNDYPSGYSHGSIRFKYYDLNEGFTEEDMLEDLKKFLELFNELASKVTKTSYDSLVNSIDEIQEDSEIEEIRTAQKDKTLKEVEAPKGIIPKYKKGVSKTTKNDSEIEKSNKENKLTGKVGEKLALNYFNELIDNKIDEDKKEQFRNILNDNPGSQHGHGYDLVAFDPTNTDKAVEKFIEIKTSTSSSIEEPFFMSLNEMFAMKEYKQKYLILRIFNVSGKEPQFYFIDPYANYSEFKDVDDLIDKVFNVEAIQYKVFGEK

SEQ ID NO: 5581 - DNA, 1509 bp, Staphylococcus aureus
ttgaatgaagaaatcttacgcgaagtagcagatatttttataggtgatgacagagatagcatttatgattataaaactgggaacgaattagtgaggttttttaatcattactttaataaaggggacatatatcaggctccgtttccatctagatggctatatgttgtgaaacatttgcaaactctgattcaggagagaaagatcaatcaatttttcacattaattttaagcaatcactatattaagtatgaactgaaaattgacgaggttgaagcagcaaagcaggctgctaaagcacttaagttgttcaacaaaagattaaatcattatgggtactacataacaggaactaacaatgctagatattttatggataaggatgaagatacggagtctattggttatggagggtatgcgaatatttatttacagaagtctacaggtcttgctgtaaaaaaattgaaagaggagtatcttactgattcttcaattaaaagtaggtttaagagagaatttgatctcactaaatcttttgatacaaatccattgttcattaatgtgtttgaatttaatgaatcagattattcatacacgatggagttagctgatgaaactttgaaagattacattgaaagcaagacaattagtgagctagaaaaagtaaagataataatgaaaattttaaaagcgatgagtcaagcacatagtgaaaataaaatacacagagatatcagttctaaaaatgtattaatgtttagaggaaaagtcaaaatatcagacttaggattaggtaaaaaccttgatgaaattcattcgcatcaaacctttgatacaaacggtgtaggacaatataaatactgtgcaccggaacagatgtatagtttaaaacaagcagataaacaatctgatgtttttagtttaggaagattgataaattttattatgactggaaatgtagttaacaaccatcacctatttagaggtgtatctgataaggctacgaacagtagtaaagaatacagatttgaagatgcaaatgaaatgttgaaaatgctgcagagaattttagagtatcacagtagtgcaaagcacgtcgaaaaatgtcaagaaaagctgaaaagaggagtgtttgatgatgaaagcgaagaatttattatgacacgaagtgatgaacaattatgtcaaatggttctaagttctaataataatgagcaagcgtgtttaattcgttatatgcaaaaaaacgaatcttcagcatgtgatttaatagagagtattaatagaaagtatcaagagttttgtggaaggtttgaagactacgatccttttgctaaattagcatatatgattttatgtaataacttcagttatagagtgaatgaaacagcagctagagtgctaaattatgttgcttggtctgtaaatagattttcggcacaagacttaattaaaggtttaattaatagaggagtggagcctttgattgaagaaaaattaaaggacaattaa

SEQ ID NO: 5582 - protein, 502 aa, Staphylococcus aureus
MNEEILREVADIFIGDDRDSIYDYKTGNELVRFFNHYFNKGDIYQAPFPSRWLYVVKHLQTLIQERKINQFFTLILSNHYIKYELKIDEVEAAKQAAKALKLFNKRLNHYGYYITGTNNARYFMDKDEDTESIGYGGYANIYLQKSTGLAVKKLKEEYLTDSSIKSRFKREFDLTKSFDTNPLFINVFEFNESDYSYTMELADETLKDYIESKTISELEKVKIIMKILKAMSQAHSENKIHRDISSKNVLMFRGKVKISDLGLGKNLDEIHSHQTFDTNGVGQYKYCAPEQMYSLKQADKQSDVFSLGRLINFIMTGNVVNNHHLFRGVSDKATNSSKEYRFEDANEMLKMLQRILEYHSSAKHVEKCQEKLKRGVFDDESEEFIMTRSDEQLCQMVLSSNNNEQACLIRYMQKNESSACDLIESINRKYQEFCGRFEDYDPFAKLAYMILCNNFSYRVNETAARVLNYVAWSVNRFSAQDLIKGLINRGVEPLIEEKLKDN

SEQ ID NO: 5583 - DNA, 627 bp, Staphylococcus aureus
atgcaattacaaaccatgagtaattccatatttataaaaaatttgatttttgcaataaatgaatcgttagaatattctgaaaccaactctgtcatggaagttacttttcaaaaggctataggcttcactcaatacaattttgaaggagaaaaattaaaattaaaggatgacttgaaggagttaataagccttgttggacgagaagaagctgtattgatattcgtaaaccgattgaatgaaggtctatattgtattttaaatcaactaatagaatgggataatctaaattatcaattcgccatgtataaagaggctatgcataattacttatttaatacaattgagaaattaaatgatgacacacttttcctcctgcatcaagatggtttaattacattgcctgagcataagtacaaaactgtagccgtaaaaagtacattcggtagtagagattttacttttagatttaaatttccagaagaatcagatacagttaatacacaccaaatgctaaataaagcaatatcaattacaggtagtctagcaaatacacatttggaacaaccccaaaaatacaaggcacattttaaaaaaataccaatcgaaacaaaaaatttgacatcttag

SEQ ID NO: 5584 - protein, 208 aa, Staphylococcus aureus
MQLQTMSNSIFIKNLIFAINESLEYSETNSVMEVTFQKAIGFTQYNFEGEKLKLKDDLKELISLVGREEAVLIFVNRLNEGLYCILNQLIEWDNLNYQFAMYKEAMHNYLFNTIEKLNDDTLFLLHQDGLITLPEHKYKTVAVKSTFGSRDFTFRFKFPEESDTVNTHQMLNKAISITGSLANTHLEQPQKYKAHFKKIPIETKNLTS

SEQ ID NO: 5585 - DNA, 150 bp, Staphylococcus aureus
atgcaatccatattttcgtttatgcttgaagttatacatctaaaaacagtattggtttcttcgtataaaaataacttattaatagaggtaacattgattaagactgagtatacgtataataagagtgactctgacatctcatttagataa

SEQ ID NO: 5586 - protein, 49 aa, Staphylococcus aureus
MQSIFSFMLEVIHLKTVLVSSYKNNLLIEVTLIKTEYTYNKSDSDISFR

SEQ ID NO: 5587 - DNA, 897 bp, Staphylococcus aureus
atggaaaaaattctatatcaaactgacgaattcaagctcaaaccttcgggatggtacaaaaccatccctcctaaaaaagatgggggtacggagtttgaaataatgttatctggaccgattgctttcacagatcgttttatagaccccgcgactcgtaaagaaaaagtatttctttcggatttgaataatatagagcttgtcgaaaaggcttcaatccttactgctttgcaattaccctccttaattgaatatggatttaccattaatgaaaagcacattagagatttagggttcgtactgcaacaaatgagaagcaccacacctttatcaacaatatactcaggtgtaggaatgcttcatacattacttggaccattaatttcattagaccagccttatttttctaatgagattactaatagcacttctattatatgtgataacaagtacgatttaataccaaaaggcaatttatcagaatggttacaaatgtataaagaagaagtccatgggaacttatctttagaactagatgtgttgtttggcgtatcttcattagtcactgctttccttaagtatcataataacgtcgagttttcaggaactattttctctttcactggccaatcatcaacaggaaaatcgacagccgctatgttagccgcatcggtagctggcaacccaacaaaaggtactgaaaacctattccggagttggaatgcaacaagaaatgcactagaaggatatcttagcggaaattatggtgtacccatagtattagatgaattatcagcggcaacatttcatgatacaacaggtcttctatattcatttgcagagggacaaggacgtcaaagagcaaatataaatggtgatgtcaaaacacctaaaaactag

SEQ ID NO: 5588 - protein, 298 aa, Staphylococcus aureus
MEKILYQTDEFKLKPSGWYKTIPPKKDGGTEFEIMLSGPIAFTDRFIDPATRKEKVFLSDLNNIELVEKASILTALQLPSLIEYGFTINEKHIRDLGFVLQQMRSTTPLSTIYSGVGMLHTLLGPLISLDQPYFSNEITNSTSIICDNKYDLIPKGNLSEWLQMYKEEVHGNLSLELDVLFGVSSLVTAFLKYHNNVEFSGTIFSFTGQSSTGKSTAAMLAASVAGNPTKGTENLFRSWNATRNALEGYLSGNYGVPIVLDELSAATFHDTTGLLYSFAEGQGRQRANINGDVKTPKN

SEQ ID NO: 5589 - DNA, 870 bp, Staphylococcus aureus
gtgatttcaacttctgaacatagtattttcaaaaatccagctaaaaatgatggtttgcgtgttcgtactattgaggtgtctgaaaaattcacatcaagtgctcaaaactcagatactataaaaaaagtggttagtcaaaataatggtcatgttttacctataattgctcaattcctattagacaacactaatgatgttacttccctttttcaaaaagaagacagtgttttttatcaattactatcaactgaatccagtaacactggtattcgaatgattaaacattatgcaactctaacaacaacagcccatattttaaatcaatcactagacctacagttaaacgttagcagcataaagaactatttattaagctatcataatgaaacggtgtcagaacgttctcttgcagataaagcgatggatacaatcgtacagtttattgcggaaaacctgggcaagttttcacaacaaacacgtcttgctaatatgattcaaaactttggtatcctctcacttaaagatgactacatcgaagtaaaaattatccgaaatgtattcgataagatgttaacagacagtcaattcgaagacacgaaaaatgttattgatgctttggataatgcaggaaaattagtttccgatcgggatcgaaagacaacaaaaagaaatgcgaaagatgatacaggcaaaagtacttctcttgtcttctaccaaatcaaaattgatttagattatgctgacgttcttggattgcaatcccaaggacgcgacaacgtaattcaaaaacattcaaatccatcacagtttaaaaacacaaacttagaggagtttatgaaaagtgaaaacaccacactcattgtgttttag

SEQ ID NO: 5590 - protein, 289 aa, Staphylococcus aureus
MISTSEHSIFKNPAKNDGLRVRTIEVSEKFTSSAQNSDTIKKVVSQNNGHVLPIIAQFLLDNTNDVTSLFQKEDSVFYQLLSTESSNTGIRMIKHYATLTTTAHILNQSLDLQLNVSSIKNYLLSYHNETVSERSLADKAMDTIVQFIAENLGKFSQQTRLANMIQNFGILSLKDDYIEVKIIRNVFDKMLTDSQFEDTKNVIDALDNAGKLVSDRDRKTTKRNAKDDTGKSTSLVFYQIKIDLDYADVLGLQSQGRDNVIQKHSNPSQFKNTNLEEFMKSENTTLIVF

SEQ ID NO: 5591 - DNA, 198 bp, Staphylococcus aureus
gtgaccgcttctggctctggtttagacccagatattacggttgacaatgcgaaacaacaagtaaaacgcattgcgaaagaaagaaacatagatgcttcaaaaattaatcaccttattgatgaaaacaaacaagcatcaccaatggcagatgattatgttaatgtcttaaaattgaatatcactttagataaactctaa

SEQ ID NO: 5592 - protein, 65 aa, Staphylococcus aureus
MTASGSGLDPDITVDNAKQQVKRIAKERNIDASKINHLIDENKQASPMADDYVNVLKLNITLDKL

SEQ ID NO: 5593 - DNA, 2022 bp, Staphylococcus aureus
atggctgaaactactaaaatatttgaatcacatttggtcaaacaggctctaaaagacagtgtattgaagctctatcctgtttatatgattaaaaatccgattatgtttgttgtagaagtgggcatgctgcttgccttaggattaaccatttatccggatttatttcaccaagaaagtgtatcacggctatatgtgttcagtatctttatcatattattactgacacttgtctttgcgaacttctctgaagcattagctgaaggtcgcggtaaagcacaagccaacgctttacgccaaacacaaactgaaatgaaggcacgtcgtattaaacaagacggcagttatgaaatgattgacgctagtgacctgaaaaaaggacatatcgtacgtgtcgcgacaggtgaacaaatcccaaatgacggtaaagttattaagggcctcgcaacagtggatgaatctgcgattacaggtgaatctgcacctgtaatcaaagaaagcggtggagatttcgataatgtaattggaggaacttctgtagcttcagactggttagaagttgagattacttcagaaccaggtcattcatttttagataaaatgattggtttggttgaaggggctacaagaaagaaaacacctaatgaaattgcgttatttactttattgatgacattaacgattatcttcttggtcgttattttaacgatgtatccattggcgaaattcctgaatttcaatttatccattgcgatgctgattgctttggctgtgtgtttaattccaacaaccattgggggattattatcggctatagggattgcagggatggatcgtgtgacacagtttaatatcttggctaaaagcggacgttctgtagagacttgtggtgatgtgaatgtcttgattttagataaaacaggtaccattacctacggcaaccgtatggcagatgcgtttattccggtgaaatcatcaagctttgaacgtttagttaaagcggcctatgaaagttctatcgcagatgacacaccagagggacgtagtattgtgaaattagcttataaacaacatatcgacttaccgcaagaggtcggagaatatattccgtttactgctgaaacacgtatgagcggtgtgaaatttacgacacgtgaagtatataaaggtgcaccgaatagtatggttaagcgtgtgaaagaagcagggggacatattccagttgatttagacgctcttgtcaaaggggtgtctaaaaaaggtggcacaccgctggttgtgcttgaagataatgagattttaggtgttatttatttgaaagatgtcattaaagatggactcgtagaacgtttccgtgaattacgtgagatggggattgaaacggtgatgtgtacaggagataacgaattgacagctgcgacaatagcgaaagaagcgggtgtggatcgctttgtggcagagtgtaaacctgaagataaaatcaatgtgattagagaagaacaagcgaaaggtcatattgttgcgatgacgggtgacggtacgaatgacgcgccagctttagcagaagctaatgtaggtttggcaatgaactcaggaaccatgagtgccaaagaagcggcgaatttaattgatttagattctaatccaaccaaactgatggaagtcgttctaattgggaaacaattattaatgacacgtggctcactcactacatttagtattgcgaatgacattgcgaaatactttgcgattttaccagccatgtttatggcggctatgcctgcgatgaatcatttgaatattatgcatctgcattcacctgaatcagcagtattatctgcgttaatctttaatgcgttgattattgtattattgattccgattgcgatgaaaggcgtgaaatttaaaggtgcctcaacgcaaaccatattgatgaaaaatatgttagtttacggcttaggcggtatgatcgtgccatttatcggcattaagctcattgatctcatcatccaactctttgtctaa

SEQ ID NO: 5594 - protein, 673 aa, Staphylococcus aureus
MAETTKIFESHLVKQALKDSVLKLYPVYMIKNPIMFVVEVGMLLALGLTIYPDLFHQESVSRLYVFSIFIILLLTLVFANFSEALAEGRGKAQANALRQTQTEMKARRIKQDGSYEMIDASDLKKGHIVRVATGEQIPNDGKVIKGLATVDESAITGESAPVIKESGGDFDNVIGGTSVASDWLEVEITSEPGHSFLDKMIGLVEGATRKKTPNEIALFTLLMTLTIIFLVVILTMYPLAKFLNFNLSIAMLIALAVCLIPTTIGGLLSAIGIAGMDRVTQFNILAKSGRSVETCGDVNVLILDKTGTITYGNRMADAFIPVKSSSFERLVKAAYESSIADDTPEGRSIVKLAYKQHIDLPQEVGEYIPFTAETRMSGVKFTTREVYKGAPNSMVKRVKEAGGHIPVDLDALVKGVSKKGGTPLVVLEDNEILGVIYLKDVIKDGLVERFRELREMGIETVMCTGDNELTAATIAKEAGVDRFVAECKPEDKINVIREEQAKGHIVAMTGDGTNDAPALAEANVGLAMNSGTMSAKEAANLIDLDSNPTKLMEVVLIGKQLLMTRGSLTTFSIANDIAKYFAILPAMFMAAMPAMNHLNIMHLHSPESAVLSALIFNALIIVLLIPIAMKGVKFKGASTQTILMKNMLVYGLGGMIVPFIGIKLIDLIIQLFV

SEQ ID NO: 5595 - DNA, 1677 bp, Staphylococcus aureus
atgagtattgtgttgtttttgattgtatttatcttgctctcactcattgtgagccgatatttatattcagttgctttaaatgtgccatctaaaatagatgttgtttttaatccgattgagaaattgatttatcaactgattggcacgaaattagaacacatgtctgggaagacgtatatcaaacattttttgttgtttaacggattgatgggcggattgtcctttgtattattgcttattcaacaatggctgtttttgaatcctaaccataatttaaatcaatctgtatcgttagcctttaatactatggcatcttttttgaccaatactaacttacagcattatgcaggtgaaacagatttaagttatttaacacaaatgtgtgtcatcactttcttaatgttcacgtcagcagcgtcaggttacgccgtatgtattgcgatgttaagacgtttgactggaatgacagatgtgattggtaatttctatcaagatattacgcgttttattgtacgggtgctcatacctttcgcattgatcatcagtttgtttttaatcagtcagggcacaccgcaaacgcttaaaggtaatttggtgattgagacattatcaggtgtgaaacaaacgattgcatatggaccgatggcgtctttagaatctattaaacatttagggacaaatggtggtggtttcttaggtgcgaactcttctacaccttttgaaaatccgacatactggtctaattacgctgaagctttaagtatgatgttgattccaggttcattagtctttctattcggtagaatgttgaaaactaaactacagattcatccgcatgcgattatgattttcgttgcgatgtttgtaatgttcatcggctttttagtgacatgtctctattttgaatttgcggggaatccagtgttgcatcacttaggtattgccggtggcaatatggaaggcaaagaaacacgtttcggtattggcttatccgctttatttacaaccattacgaccgcttttactacaggaacagttaacaatatgcacgatagtcttacaccgctaggcggcatggttccaatggtattaatgatgttgaatgcagtttttggcggtgaaggtgttgggctgatgaacatgttgatttatgtcgtgttaacggtctttatctgtagtttgatgattgggaaaacaccaagttatttaggaatgaagattgaaggtaaagagatgaaactcattgcgctttctttcttagtacatcctttacttattttggttttttcagcactagcttttattgtgccaggggcatcagatgcgttaactaatccgcaattccacggtgtatcacaagtgttgtatgagtttacatcatcttcagcgaataatggctctggttttgaaggattaggagacaatacggtattttggaacatttcaacaggcattgtgatgttgcttgcacgatatattccaatcgttttacaaattttgattgtatctagtttggtaaataaaaagacctatcagcaacatactcaagatgtaccgattaataatttatttttcagcagtgtattgattatctttattattttgttgagcggcttaacgttcttacctgacttaatgcttggaccaataggcgaacagcttttgctgcacgcatag

SEQ ID NO: 5596 - protein, 558 aa, Staphylococcus aureus
MSIVLFLIVFILLSLIVSRYLYSVALNVPSKIDVVFNPIEKLIYQLIGTKLEHMSGKTYIKHFLLFNGLMGGLSFVLLLIQQWLFLNPNHNLNQSVSLAFNTMASFLTNTNLQHYAGETDLSYLTQMCVITFLMFTSAASGYAVCIAMLRRLTGMTDVIGNFYQDITRFIVRVLIPFALIISLFLISQGTPQTLKGNLVIETLSGVKQTIAYGPMASLESIKHLGTNGGGFLGANSSTPFENPTYWSNYAEALSMMLIPGSLVFLFGRMLKTKLQIHPHAIMIFVAMFVMFIGFLVTCLYFEFAGNPVLHHLGIAGGNMEGKETRFGIGLSALFTTITTAFTTGTVNNMHDSLTPLGGMVPMVLMMLNAVFGGEGVGLMNMLIYVVLTVFICSLMIGKTPSYLGMKIEGKEMKLIALSFLVHPLLILVFSALAFIVPGASDALTNPQFHGVSQVLYEFTSSSANNGSGFEGLGDNTVFWNISTGIVMLLARYIPIVLQILIVSSLVNKKTYQQHTQDVPINNLFFSSVLIIFIILLSGLTFLPDLMLGPIGEQLLLHA

SEQ ID NO: 5597 - DNA, 2670 bp, Staphylococcus aureus
atggaaagtacatataaaaaaagagggaaacttaccatttatttaggctatagcccaggggtaggtaaaacgtatgaaatgttatcaaatggtattgatcagtatcaagaaggtgcagatattaaaattggttatatcgaaccccatcaacgccctgaaaccaatgcactggttcaacaattgcctgaaatttcgacctccagccgtaaatttggcagccacacctttcactatatagatgtctctaaaatcatagaagctaatccagatgtggtcttaattgatgaactagcacatacaaacatttcaaaagagcgccatttaaaacgttataaggatatagaagaaattctatcgcatggtatcgatgtctggacaacactcaacatccaacatatcgagagtctaagcggacaaattgcgttaatgacaggtattcaagttacagaacgtgtgcccgaccaattcattacgtcagcagatgcctttgaagttgtggatatttcaccaaatatgttgattcagcgccttaaagcaggaaaagtatataaaaaagaacgcttagaaacagccttttctaatttctttacgtatgaaaatctgacagagctgcgtgaacttacactcagaactgtcgcagatattatgagtcaaaaaggacaacaatataaaactaaacataccgacattacaccgcatattgcggtagctatcagcggcagtatttataacgaacgggtcatacgagaagcaagacgtgctgcctataaagaacatgctaaattcacagctgtgtatattgatgtctttgagacaccgtcagaaagcagaaaacaagatcattatgtccataaaaatctaatgctcgccaaagcgttaggtgcagaaatcaaagtgttgtatgcacaagatattgcgaaagcgttaaccgattggtgtgatctcgcttttgtgacgaagctagtccttggacagtcagaacagccacgttggaaagattactttaaacagtcactcattgaacaaattaatcacgtaccacaccatttcaagttagaaattgtaccgattcattatattcattcagacaaacctacaaatacacctaagcaagctcaaaaatcctctcgtttaactgtagagattatgaagatgcttgtaattcaaacgatctgtgtcttgctcggtatatgggtttacaacttagataaaagcgaatccagtgccattatcttgctgatgttctttatcggtattatcgtgctttctatttggacccaatcctatttaatcggattctttgcgtctatcttaaatgtgtttgtttttaattatttctttacggtgccaagattcactttagaaatgtatcgctttgaatatccgattacgtttgcgaccagtatttttgctagtatctttacgagtgccatcttaaagaatttaaaacatcagcattccttaacagaacggcagttatatcggaccaatattatgctgcaatttaaccagtccattaaagaatcttattcaattgaacgcttattaaatattgctggtgatcagattcatcagctactcaatcaggatgtcacggtattcttaattcaaagtaagaaagtcgctgcttccaactcatttggaaacagaagcatttcaagctcagataagacacatgatgctgagacattgagctgggtcattgaaaatgaaagccgtgccggtaaattaaccgatacctttcctggcagtaaatttttgtgtattcccattggcacaaatccagtcaaaggtgtgatttctatccgcttcaccgacgaaacttacatcgacacctatgacaattcaatattagactctatgttgaacgatattaccctggcaatagagaatgtggatctattaaaacaaaccagacaatccatattgaaagctgaacgagaagccacacgttcaaacttcttgcattcaatttcacatgatattagaacaccactgacttccattatgggcaacttagatatgctgaaataccataacgagcatttaaacgatcaacaacaagcagaactcttaactgcttcttatggcgaagcacaatatctgcataccttagtcacaaatattttatctttgactaagttagaaagctctgacattcaaatacaacgcaccccttatttagtagaagaacttctagaagaatttgaagaaggcctcatacgcagacaccaagcaaatcatgtcattattgaaaatgaggatgacgcttcactcattaatatcgacagtaaattaatactgcaagtgctattcaaccttatcgataatgctttaaagcatgcagaatcacattctgaaataaaactgcacgttcaacatgaaacaaacaaaataaaattcgaaatgatagattgcggaaaaggtattccagaagaagaacgtcaattgatttttaatccctattattcaggagacaactttaaagacaataaaaaagatagtttgggattagggctctatttagtacaactcatcttgaaacaacacaacagtgaattagaatatcaaccgaatacaccacaaggcagtattttttatttttatttgactgttaatccaattgaaatggagggagccatggatgaaaacaacattattggtcgttga

SEQ ID NO: 5598 - protein, 889 aa, Staphylococcus aureus
MESTYKKRGKLTIYLGYSPGVGKTYEMLSNGIDQYQEGADIKIGYIEPHQRPETNALVQQLPEISTSSRKFGSHTFHYIDVSKIIEANPDVVLIDELAHTNISKERHLKRYKDIEEILSHGIDVWTTLNIQHIESLSGQIALMTGIQVTERVPDQFITSADAFEVVDISPNMLIQRLKAGKVYKKERLETAFSNFFTYENLTELRELTLRTVADIMSQKGQQYKTKHTDITPHIAVAISGSIYNERVIREARRAAYKEHAKFTAVYIDVFETPSESRKQDHYVHKNLMLAKALGAEIKVLYAQDIAKALTDWCDLAFVTKLVLGQSEQPRWKDYFKQSLIEQINHVPHHFKLEIVPIHYIHSDKPTNTPKQAQKSSRLTVEIMKMLVIQTICVLLGIWVYNLDKSESSAIILLMFFIGIIVLSIWTQSYLIGFFASILNVFVFNYFFTVPRFTLEMYRFEYPITFATSIFASIFTSAILKNLKHQHSLTERQLYRTNIMLQFNQSIKESYSIERLLNIAGDQIHQLLNQDVTVFLIQSKKVAASNSFGNRSISSSDKTHDAETLSWVIENESRAGKLTDTFPGSKFLCIPIGTNPVKGVISIRFTDETYIDTYDNSILDSMLNDITLAIENVDLLKQTRQSILKAEREATRSNFLHSISHDIRTPLTSIMGNLDMLKYHNEHLNDQQQAELLTASYGEAQYLHTLVTNILSLTKLESSDIQIQRTPYLVEELLEEFEEGLIRRHQANHVIIENEDDASLINIDSKLILQVLFNLIDNALKHAESHSEIKLHVQHETNKIKFEMIDCGKGIPEEERQLIFNPYYSGDNFKDNKKDSLGLGLYLVQLILKQHNSELEYQPNTPQGSIFYFYLTVNPIEMEGAMDENNIIGR

SEQ ID NO: 5599 - DNA, 696 bp, Staphylococcus aureus
atgaaaacaacattattggtcgttgaagatgatgaagcgattttacatttaatcgatgttgcgctaactatgaattattataaagtggttacggcgaagacggggaaagaagcggactttcgcctaagaacagaacaaccagatattatcttattagatttaggcttaccagatattgatggtttatctctcattcagcaattcagagactttgtggacacacctattattgtgattagtgcacgaacagaggaacaaaccattgtcgaagtattagatcgcggtgccaatgattatatgactaagcctttcaatatcgatgagttaagagcacgtatcagagtagcattacgtatgtcacgttctactgagacaattcaaagtcgtttcacaaatggtccattaaccattgatttcgatgcgaaatcagtccttgtcaatgaacagtccgtacatctaacaccgaatgaattccaactcctaacgatattatgccatcatgtcggcaaagtattaacctatcaagtgttattaaaatcactctatggctatgtcaatcatacagaaatggctgccttacgtgtacatatggcctctttacgtaaaaagttgaattatacgcaagacccaaacactgaaaagaaattaatcatcacacatcctagaatcggctaccaaatgcaacacttagaataa

SEQ ID NO: 5600 - protein, 231 aa, Staphylococcus aureus
MKTTLLVVEDDEAILHLIDVALTMNYYKVVTAKTGKEADFRLRTEQPDIILLDLGLPDIDGLSLIQQFRDFVDTPIIVISARTEEQTIVEVLDRGANDYMTKPFNIDELRARIRVALRMSRSTETIQSRFTNGPLTIDFDAKSVLVNEQSVHLTPNEFQLLTILCHHVGKVLTYQVLLKSLYGYVNHTEMAALRVHMASLRKKLNYTQDPNTEKKLIITHPRIGYQMQHLE

SEQ ID NO: 5601 - DNA, 1056 bp, Staphylococcus aureus
  misc_feature (789)..(798): n is a, c, g, or t
atgaataataaagacatatatagcgatgattttcaaaatgctttagtagacataattttgaacattgataaaataaatgtcaaagaagtttttgatgattcatgtagggctgtagatcaagataataaaaaggatactttaaatcgttctcctaaagatttttccataaatataagtgatatagtaagatatagtatactttgcatggaaaatttaagtagtgacaagattgaagaaaatatcaatatgattaaaaatcatagttcagaattaaatgacaacgacatgtttattcaagaaaaaaataattttacaactaattttaataaattctgcaacgctctaggaataaacatagcaaactttaaatcaggaaaatcatatgtatttaaaccaaaaagtttatttgtattatatgatatactctcaaacaactcagtttatctacacttttttaaaaacggtatcaatgacaaagatatagattcttctaatcgtatcaaagagaacttatattatttcatcaatcatgaaattactgatcaaagagattatgaacatgctctgactaattattatctctattttctagtagacagtaatatagaaattggaatcaaatctatcattattaagattttcactgaaaaaggtatcacttctaaagataaacttcagattcttgaatattatttagatgaaatagacgatttaaacactgaaataagtcccaaaattgctgatgctcatgttaaaaatagtacaaactttttagaaaatgaaaaagtnnnnnnnnnnagtataaacagtaatttagcaaaatatattactcatcgagacaccagagcttcggcacctaaaaatatgctgttatcattaattttaaatagtgacctagtgtctccaaaagacttagaagaaaaagaactcaaatatccaaagaaaataacaaaagaacatcatgataaattaataaaagaaatcaataaagcactagattattataatgataataacaccactccttctgactacttttatataacttcagattaa

SEQ ID NO: 5602 - protein, 351 aa, Staphylococcus aureus
  misc_feature (264)..(266): Xaa can be any naturally occurring amino acid
MNNKDIYSDDFQNALVDIILNIDKINVKEVFDDSCRAVDQDNKKDTLNRSPKDFSINISDIVRYSILCMENLSSDKIEENINMIKNHSSELNDNDMFIQEKNNFTTNFNKFCNALGINIANFKSGKSYVFKPKSLFVLYDILSNNSVYLHFFKNGINDKDIDSSNRIKENLYYFINHEITDQRDYEHALTNYYLYFLVDSNIEIGIKSIIIKIFTEKGITSKDKLQILEYYLDEIDDLNTEISPKIADAHVKNSTNFLENEKVXXXSINSNLAKYITHRDTRASAPKNMLLSLILNSDLVSPKDLEEKELKYPKKITKEHHDKLIKEINKALDYYNDNNTTPSDYFYITSD

SEQ ID NO: 5603 - DNA, 297 bp, Staphylococcus aureus
atgtatttcaatcaatcagataaattcgagcagttaaaaaagaaaatattaggtatttcattcaatttacctgaaggagaagaatttacatttcatgacttgaacagtcgtgcaaatgtacaatgttcaaaagctgtacaacaaaatgttggacgttggttcgcatattttgtaaaacatgcgccacgtgttccatttattattatcggtaaggatactcacggtcacttagtttatcttaaaacaggtcctaatccacactataacagcaacccttcgaaaggaggtgttcgctaa

SEQ ID NO: 5604 - protein, 98 aa, Staphylococcus aureus
MYFNQSDKFEQLKKKILGISFNLPEGEEFTFHDLNSRANVQCSKAVQQNVGRWFAYFVKHAPRVPFIIIGKDTHGHLVYLKTGPNPHYNSNPSKGGVR

SEQ ID NO: 5605 - DNA, 1794 bp, Staphylococcus aureus
atgactcaaactaacccttcatttaatccttcaccacgatacaaatcaaaaaaaggttggtataaagacaagcctcccaaagaaaaaggaggaatgcctactgaagttgaaatcgcaggtcctatcgttatcgaaaataagtttattgaccctaaaactaacactgaaaaagtaattattacagacgaggatcaaaaagtaattgttgaatctagtgatattttaacaacacaaaaactgccctctttaatgaaatatggatttagtattaatgaaaaatatacaaaagatttaggttatgcgttgcaacaaatgcgcaaccaattacccatttcctacttatatgaaggggtaggtatactggaaacaccgtttggtcctattgtatcgttaaatgaaatctatactactacggaatttgataataaatctccatctgacgccatttgtgagaatacttatgacttagcacctaggggaacatttgataattggtttaacatgtatctaaaagaggttaaaggttctcttcttttagaattagcagtcgtatttggtatttctgccttagtgacgagtttcctgaagcacaaacatgaaaccgaatttgccggaatcatttttagttttacaggtcaatcctcaaccggtaagtcaactgcagcttctttagctgtatcagtcgctggtaaccctaccaaaggtaatgaaactctctttagaaattggaatgccacacgtaatgcacttgaaggttacttgagtaacaattttggtatacctattgtatttgatgaactctcatcagcaacttttagagatacaacggggttattgtactccatcactgaaggtcaaggtcgtcaacgttcaaacgttcatggagaagttaaaacgcctaagaattggggtacttctgtcatttcaacgtcagaacacagtatttttaatgattcagctcaaaacgatggattacgtgtaagaaccatcgagattaatgaacaattcactacaaatgcgaccaatgctgacaatattaaaaaagctgtagcactaaactatggtcatgttttaccgttagtagctaaatatcttataaatcgtgaagatgaagttattcaatggttttacaaggaagtagattggtttgaagctaaattgaaagatgataaaagcaacacaggcaatcgtatgtttaagcgttatgcagtcattacaacatctgcaaaaatattaggtcgtgttttagctacagatattgatatcgctaaaataagagactactttattgattatcatggtcatacaatctctgaacgctcattagctgataaagctatcgatgtcatcattcaatttgtagcacaaaacagaggtaagttttcagatgaaggtgctttgaaaaatatgtttgagaactatggattaatctcattaaaagatgaccatatcgaagtaaaaatgattgcaaacgtttttaaacagatgctaaacaatcatcaatttcaagatgttaataatgttgtcaacgccttaagagataaaggtttcatattagctgaccgtggacgccaaacaactaaaagaagtgtcaaagataatagcggtaaaaaacaatcacttgtattttaccatctaaaattagatgtagagtttgcatctatcctgggattaactaaagataagtcgttaattcaaaattggacaccggcaaatgataacaaagctgcgaaagaactttttaaatccgctaatgaggggataggcccttcaggagttcacgaagatttctga

SEQ ID NO: 5606 - protein, 597 aa, Staphylococcus aureus
MTQTNPSFNPSPRYKSKKGWYKDKPPKEKGGMPTEVEIAGPIVIENKFIDPKTNTEKVIITDEDQKVIVESSDILTTQKLPSLMKYGFSINEKYTKDLGYALQQMRNQLPISYLYEGVGILETPFGPIVSLNEIYTTTEFDNKSPSDAICENTYDLAPRGTFDNWFNMYLKEVKGSLLLELAVVFGISALVTSFLKHKHETEFAGIIFSFTGQSSTGKSTAASLAVSVAGNPTKGNETLFRNWNATRNALEGYLSNNFGIPIVFDELSSATFRDTTGLLYSITEGQGRQRSNVHGEVKTPKNWGTSVISTSEHSIFNDSAQNDGLRVRTIEINEQFTTNATNADNIKKAVALNYGHVLPLVAKYLINREDEVIQWFYKEVDWFEAKLKDDKSNTGNRMFKRYAVITTSAKILGRVLATDIDIAKIRDYFIDYHGHTISERSLADKAIDVIIQFVAQNRGKFSDEGALKNMFENYGLISLKDDHIEVKMIANVFKQMLNNHQFQDVNNVVNALRDKGFILADRGRQTTKRSVKDNSGKKQSLVFYHLKLDVEFASILGLTKDKSLIQNWTPANDNKAAKELFKSANEGIGPSGVHEDF

SEQ ID NO: 5607 - DNA, 513 bp, Staphylococcus aureus
ttgactgaatttaatccaattacaacattaaaaattaacgacggagaaaaagattacgaagtagaagcgaaagtatcttttgcatttgaccaaaaagcagaaaagttctcacaagaaaccactgatgaaaacggtagaaaaggaacgacaccaggatttaatgttattttcaatggcttattagaatctcgtaacaaagcgattttgcagttttgggaatgtgcaacagcttacctaaaaaacccgccaactcgcgaacagttagaaaaagcaattgatgatttcattactgagagcgaagacactttaccactattacaaggtgctttagacaaacttaacaacagtggttttttcaagagagagagtcgctcgtactggatgacgttgcacaaagcagtgagcatgtcgaagagcgacgacaaagagatgacaaaaatgggtgtagaaatgatgaaagagaattacaaggaaatcatgggcgcagaaccttacacgattactcaaaagtaa

SEQ ID NO: 5608 - protein, 170 aa, Staphylococcus aureus
MTEFNPITTLKINDGEKDYEVEAKVSFAFDQKAEKFSQETTDENGRKGTTPGFNVIFNGLLESRNKAILQFWECATAYLKNPPTREQLEKAIDDFITESEDTLPLLQGALDKLNNSGFFKRESRSYWMTLHKAVSMSKSDDKEMTKMGVEMMKENYKEIMGAEPYTITQK

SEQ ID NO: 5609 - DNA, 630 bp, Staphylococcus aureus
atgactattatgttgctaattggcgtactgggtggatttatatctggattaataggtattgggggcgcaattattatttacccagctattcttatattgccaccattaataggtatacctgcgtatagtgcatatattgcttcgggacttacctctagtcaagtatttttcagtacacttagtggatcattaaatgcaagaaaacaaccagctttctctcctaaacttgttatatatatgggagggggtatgttgattggaagcatgttaggggcaattttagctagtttgtttaatgctacttttgtaaatacggtatatgtaataatcgccatacttgctttaatattgatgtttattaaagttaaacctactacacaagagacgaaatctaaacctttgctatttattatagttggatttggaattggtgtaatttcgggaattgtgggtgcaggtggagcatttatcatcattcctgtattattagcattatttaaattaccaatgaatacggtagtgaacaatagcatagcaattgcttttatatcttcagtaggggcattttttataaaattaatgcaaggatatataccagtagaaagtgcaatttttttgataattgaatga

SEQ ID NO: 5610 - protein, 209 aa, Staphylococcus aureus
MTIMLLIGVLGGFISGLIGIGGAIIIYPAILILPPLIGIPAYSAYIASGLTSSQVFFSTLSGSLNARKQPAFSPKLVIYMGGGMLIGSMLGAILASLFNATFVNTVYVIIAILALILMFIKVKPTTQETKSKPLLFIIVGFGIGVISGIVGAGGAFIIIPVLLALFKLPMNTVVNNSIAIAFISSVGAFFIKLMQGYIPVESAIFLIIE

SEQ ID NO: 5611 - DNA, 261 bp, Staphylococcus aureus
atgacttatgataaaaaaatgattaatcgtataaatagaatacaaggtcaattaaatggtgtcgtaaaaatgatggaagaagaaaaagattgcaaagatataattacgcaacttagtgcatctaaaggttctatacaacgtttaatggggattataattagtgaaaatttaatagaatgcgttaaaacagcagaagaaaataatgaaagttctcaagaattaattaatgaagcagttaatttattagttaaaagtaaataa

SEQ ID NO: 5612 - protein, 86 aa, Staphylococcus aureus
MTYDKKMINRINRIQGQLNGVVKMMEEEKDCKDIITQLSASKGSIQRLMGIIISENLIECVKTAEENNESSQELINEAVNLLVKSK

SEQ ID NO: 5613 - DNA, 1065 bp, Staphylococcus aureus
atggaacaatacaaagaagtacacattaattcattaaacaaagaagaattagaaaaattggcaaaaatgggtcaattgattgatgttagaacaaaagaagaatatgaattaggacacattaacggttcaactttacacccagtagaagagattaaatcattcaataagaatagcaacaaaacgtattatatacattgtaaaagcggtaaccgaagcactaaagcttgcgattatttagccaaacaaggttatgatgtcgtgaatttaaagggtggatataaagattatgaagcaaagaacttcaatagtgctcctttaatagaaaaagatattgaaatcaaagagaatcgtaaacaatttgattttagaggtcttcagtgccctggacctattgttaatatcagtaaagaaattaacaatatttcaacgggtgagcaaatcgaggtaacagttacagatcctggtttcaatagtgatattaaaagttgggcgaaacaaacagggaatacccttgtaaatcttactgaagaagcaaatgtaattaatgcaattattcaaaaagaaaagccaaaagaatttgaaatcaatgacactgctacaggtacaacaattgttttatttagcggtgagttagataaggcagtagcagcaatgatcatcgcaaatggcgctaaagcagcaggtaaagatgtaactattttctttactttttggggcctcaacgcattaaaaaaagcgcaatcaactcgcgttaaaaagaaaggtatttccaaaatgtttgaccttatgttacctaaggatccaatacatatgccattatcaaaaatgaatatgtttggactaggtaatattatgatgcgttatgtaatgaacaagaaaaatgttgattctttatactcacttatcgatcaagcaatcgatcaagatataaagttaattgcttgtaccatgagtatggatgttatgggaatttcaaaagaagaattaagagatgaagtcgattatggtggcgtaggtacttatattggacatactgagcaagcaaatcataacttatttatctaa

SEQ ID NO: 5614 - protein, 354 aa, Staphylococcus aureus
MEQYKEVHINSLNKEELEKLAKMGQLIDVRTKEEYELGHINGSTLHPVEEIKSFNKNSNKTYYIHCKSGNRSTKACDYLAKQGYDVVNLKGGYKDYEAKNFNSAPLIEKDIEIKENRKQFDFRGLQCPGPIVNISKEINNISTGEQIEVTVTDPGFNSDIKSWAKQTGNTLVNLTEEANVINAIIQKEKPKEFEINDTATGTTIVLFSGELDKAVAAMIIANGAKAAGKDVTIFFTFWGLNALKKAQSTRVKKKGISKMFDLMLPKDPIHMPLSKMNMFGLGNIMMRYVMNKKNVDSLYSLIDQAIDQDIKLIACTMSMDVMGISKEELRDEVDYGGVGTYIGHTEQANHNLFI

SEQ ID NO: 5615 - DNA, 939 bp, Staphylococcus aureus
ttgtttttcaaacaattttatgaagacaatttttcacaagcatcttatttaattggatgtcaacgtacaggagaagcaatgattattgaccctatacgagatttaacaaaatatttaaaagttgcagataaagaaggattcacaattactaaagctgcagaaacacatattcatgctgattttgcttcaggtattagagatgtggcaaataaattgaatgcaagtatatacgtatctgatgaaggtaaagatgaatttaattataaaaatatgcctaaacaaacacatttcgttaagcatcaagatattatctatttaggaaagattaaattagaagtcttacacactccaggccatccccctgagagtattagttttttacttactgacgaaggtgggggttccagtataccaatgggattatttagcggtgacttcatctttgttggtgatgtaggtagaccagatctattagaaaaagctgtaaatgttgaaggttctacaaaaatcggagcaaaacaaatgtatcagtccatacaatttgctgcaacattaccagactatattcaaatttggccaggtcatggtgcagggagtccttgtggtaaagcgctaggttcattacctacaactactttgggttatgagaaaataaacaactgggcttttaatgttaaagatgaaacttcatttatcgaaactttaacactcaatcagccagctccaccacaccatttttcacaaatgaaaaaaataaatcaatttggtatgcaaatgtaccaaccatataatgtttaccctagttcaagcaatacacaaactgcttttgatcttcgaagtaaagaagcattccatggtggtcatatgcatggaactatcaatattccttttaataaaacttttataaatcaaattggttggtatttagattatgactaa

SEQ ID NO: 5616 - protein, 312 aa, Staphylococcus aureus
MFFKQFYEDNFSQASYLIGCQRTGEAMIIDPIRDLTKYLKVADKEGFTITKAAETHIHADFASGIRDVANKLNASIYVSDEGKDEFNYKNMPKQTHFVKHQDIIYLGKIKLEVLHTPGHPPESISFLLTDEGGGSSIPMGLFSGDFIFVGDVGRPDLLEKAVNVEGSTKIGAKQMYQSIQFAATLPDYIQIWPGHGAGSPCGKALGSLPTTTLGYEKINNWAFNVKDETSFIETLTLNQPAPPHHFSQMKKINQFGMQMYQPYNVYPSSSNTQTAFDLRSKEAFHGGHMHGTINIPFNKTFINQIGWYLDYD

SEQ ID NO: 5617 - DNA, 306 bp, Staphylococcus aureus
ttgccacaaacaaatatcgtcacatcatctattcatagttctgaaatgactggtgaagaacataatgtattagatgttcgtaatgatgatgaatggcgtaaaggtcatttaaaacaagcaattcatattcctcacggtaaacttttaaatgaagatatacctttcgataaaaatgacctaatttatgtacattgtcaatcaggtgttagaagttcaatagcggtaggaatattagaatataaaggatttacgaatattgttaacgttagaggtggctatcaacatttaccagcatttttaaaatag

SEQ ID NO: 5618 - protein, 101 aa, Staphylococcus aureus
MPQTNIVTSSIHSSEMTGEEHNVLDVRNDDEWRKGHLKQAIHIPHGKLLNEDIPFDKNDLIYVHCQSGVRSSIAVGILEYKGFTNIVNVRGGYQHLPAFLK

SEQ ID NO: 5619 - DNA, 186 bp, Staphylococcus aureus
atgtttggcgatcaaagacaagaagctacaaaatatgtcattaaagaaggttatcaagatatttatttcctcaacaaaaacggggaatggtattatttcgaagtaagaagtgtctggcgtggcaaacatattattagagttaaagatggtttgttaggttggagaaaagaaatagtaactgaataa

SEQ ID NO: 5620 - protein, 61 aa, Staphylococcus aureus
MFGDQRQEATKYVIKEGYQDIYFLNKNGEWYYFEVRSVWRGKHIIRVKDGLLGWRKEIVTE

SEQ ID NO: 5621 - DNA, 468 bp, Staphylococcus aureus
atgacgattaaagttgaagataataaaattattttttcaagaacgatagaagcaccgattgaaaaggtgtttgatgactatacgacaaaggcattatttgaaaaatggtttcatccaaaagacgctagtaccaaagtgtttcgctttaatgctgtttcaggtggtgatgcattttacgcgattaaaacacctacaatgacaagctatacattagcagaatataaaacggttaagcgtccatatttaattgaatatattgactcatttgcgacacctcaaggtgcaaaagatacaaaaatgccaagcatgaagattactttgtcattttccgagttcgatacaacgaaaacgacagtgacatcaacatcggtatttccaacaaaagaagccgctcaacaagtcataaacatgggtgttgagcaagggatgaatcaaacattagatcaacttgatgctttattgaaataa

SEQ ID NO: 5622 - protein, 155 aa, Staphylococcus aureus
MTIKVEDNKIIFSRTIEAPIEKVFDDYTTKALFEKWFHPKDASTKVFRFNAVSGGDAFYAIKTPTMTSYTLAEYKTVKRPYLIEYIDSFATPQGAKDTKMPSMKITLSFSEFDTTKTTVTSTSVFPTKEAAQQVINMGVEQGMNQTLDQLDALLK

SEQ ID NO: 5623 - DNA, 411 bp, Staphylococcus aureus
atgattccaaatcctaatgcgccagatgaatataaatatgaaactgattatagaaaaataccaagaaaatatttaaaccctaaaatccctcaagggcgtggaaaaatcaaatggcaagcttttgcgactctcccgcaacagtttgaaattttagaacaaattataaaggatcaaaataaaatagaaaaaccattgctaacacatgattcattagataatttagatcagatttttcaaataaaaattcaaaatgatgagttatgtacaatctcatattgggaagacggtaacatttcaaaatatacaggaaaaattttaaaaaaggatgaaattagtaatacattttccttttctgatactaacaataatatatataatttaaataatgctaacgtttgtagtatcacttaa

SEQ ID NO: 5624 - protein, 136 aa, Staphylococcus aureus
MIPNPNAPDEYKYETDYRKIPRKYLNPKIPQGRGKIKWQAFATLPQQFEILEQIIKDQNKIEKPLLTHDSLDNLDQIFQIKIQNDELCTISYWEDGNISKYTGKILKKDEISNTFSFSDTNNNIYNLNNANVCSIT

SEQ ID NO: 5625 - DNA, 147 bp, Staphylococcus aureus
atgaaattgtacttagtttatgtaaccttaacatcgtttttaacaattttattactagcaatatctaacatgtatgtcgcttttagtgtgtacggcatgatggtaacttatggatttaatttaacaggaggattagaaaatgaataa

SEQ ID NO: 5626 - protein, 48 aa, Staphylococcus aureus
MKLYLVYVTLTSFLTILLLAISNMYVAFSVYGMMVTYGFNLTGGLENE

SEQ ID NO: 5627 - DNA, 1140 bp, Staphylococcus aureus
atgaacatatataaagaaataaaagaaaaaaataataaagttaaattgtacaatgacataaaatttaaacttattattatacctaatgaagaaaaaaaagagaaaatgtcatacgatatttgtgattttgagatgaactgcgaaaacagtgataatgataatctaaataaaaaaagtgaaattatatgtaataatttaaaatcagaattaaataaatgtaaaactcataataaggaaaaatcatggcaaatattttattttattaaagaatttatacagtctttagatctattggaagaatttaattttaattattttagagggcagcgttctaattggaaagtattgccaggtttactaagagatagcactaataaagagtatataaatcattttgaacaagaatataaaagacttgcttataattaccctgaagagctctcttatttaccttatgataaaaataacagattagaaagggctaattatttatctatattgcagcattatggaatgcaaacaagtttgctcgatattacaaaaaatccatttatcgcattattatttatggttagcgaagaaaataaaaataaaattaataaacctagttttattttgtatgaaatagacgaaaatattcatcatgagtctcatctatttattagagttataaaagatgcaaataacaaacgaattgaagcgcaaagaggagcatttctatgttatgattatctatatagtttgaatataacagatataaaaagaattaatcgtataattttagatatagaagttagcaaagataaatatgtagaaaagttaaaaaaagacattgaaataatcaatcaattaaaaaaggaatatgaaaatagtgaagaaaaaaaagatagtgattttaataatatagtaaatgaagctatagaatttagaaaaacactattagaaaatcttgaaattcctaaagatgcgaatgaaaaaattgatgaatgctatgaagaactcagaaaagaaatgttaactaagctaaaagaatatcattattttgaaaatcaactttatccagatttagataaacaaattgcgtatatattgtctaaatacaatgaccaatcaagtaaaaaatacatttctgatttgtaa

SEQ ID NO: 5628 - protein, 379 aa, Staphylococcus aureus
MNIYKEIKEKNNKVKLYNDIKFKLIIIPNEEKKEKMSYDICDFEMNCENSDNDNLNKKSEIICNNLKSELNKCKTHNKEKSWQIFYFIKEFIQSLDLLEEFNFNYFRGQRSNWKVLPGLLRDSTNKEYINHFEQEYKRLAYNYPEELSYLPYDKNNRLERANYLSILQHYGMQTSLLDITKNPFIALLFMVSEENKNKINKPSFILYEIDENIHHESHLFIRVIKDANNKRIEAQRGAFLCYDYLYSLNITDIKRINRIILDIEVSKDKYVEKLKKDIEIINQLKKEYENSEEKKDSDFNNIVNEAIEFRKTLLENLEIPKDANEKIDECYEELRKEMLTKLKEYHYFENQLYPDLDKQIAYILSKYNDQSSKKYISDL

SEQ ID NO: 5629 - DNA, 540 bp, Staphylococcus aureus
atggaagagaaacgatataaagtttatcaaagaggcgaaataatttatgcagattttggtaaaggtgtaggtcatgagttttcatacaaacacttttgcatagtcataaacaaaaaggataataaaaataacggcaaagtgaccgtaatccctttaacttccaaaagcaaacacaatgcttttgtaaatatacatcttataaaaccttttttaaatacactaaaacaatcaattgccaaacacgagaaaaagatagaatcgattgaaaacattataaatcaaaatcccaatgatttaaaagtcattgtttatgcaaggtttttgtgtgactccttaaagaacgaaatgaaacaatacgattttgtggaaaacaaattaaaaaacttagttgacaaaagttcttatgcaaaaacacaggatattactacaataagtaaggatagaattttaaattatattaaagatttaagcgttttaattagattgccgaaacacgaaactgaccgattggttaacatctgtttcaaaaaaatgagttga

SEQ ID NO: 5630 - protein, 179 aa, Staphylococcus aureus
MEEKRYKVYQRGEIIYADFGKGVGHEFSYKHFCIVINKKDNKNNGKVTVIPLTSKSKHNAFVNIHLIKPFLNTLKQSIAKHEKKIESIENIINQNPNDLKVIVYARFLCDSLKNEMKQYDFVENKLKNLVDKSSYAKTQDITTISKDRILNYIKDLSVLIRLPKHETDRLVNICFKKMS

SEQ ID NO: 5631 - DNA, 267 bp, Staphylococcus aureus
atgccaataccaactaatgcacctacaattaatgttataggtaacgttaaactggatatcgacacacctaaaatcggaaatagtttaacaagtgatgcgattttagttcttaaaaacgcgaatataccaccagctttattaacgtttattaacaagggtcctaaaactgtcattgcattccccatcacgctgataaataaaccgaacataaaaactaaaggacctaaaactgctgcaaataatccaaacccaacaaccgctaattga

SEQ ID NO: 5632 - protein, 88 aa, Staphylococcus aureus
MPIPTNAPTINVIGNVKLDIDTPKIGNSLTSDAILVLKNANIPPALLTFINKGPKTVIAFPITLINKPNIKTKGPKTAANNPNPTTAN

SEQ ID NO: 5633 - DNA, 384 bp, Staphylococcus aureus
atgatgctgaaatttaaagcttgggataaagataaaaaagttatgagtattattgacgaaatcgattttaatagtgggtacattttgatttcaacaggttataaaagtttcgatgaagtaaaactgctacaatacacgggtttaaaagataagaacaacactgaaatatatgatggcgatattgcagagtttaaatatcctcatgacaaacgttttaaagaaatagggataataacgcattctgcagaaaaggcttgttttgtaatcaagatgataagagacacagtccaagaatttgagttatatagaggtgttgcgaatagctatttaaaagttattggtaataagtttgataatccggagttactggaggaatcggaatga

SEQ ID NO: 5634 - protein, 127 aa, Staphylococcus aureus
MMLKFKAWDKDKKVMSIIDEIDFNSGYILISTGYKSFDEVKLLQYTGLKDKNNTEIYDGDIAEFKYPHDKRFKEIGIITHSAEKACFVIKMIRDTVQEFELYRGVANSYLKVIGNKFDNPELLEESE

SEQ ID NO: 5635 - DNA, 609 bp, Staphylococcus aureus
atgaaagggagtagtccaatgagaaaaaagagtggtccaattaacaagcgtgtagattttctctctaaccgattgaacaaatattcgattagaaaattcactatcggtacagcttcgattttagtaggttctacgttaatttttggtattggtagcggtgaagctaaagctgacgaaaaagtttacaccaataatgaaaatggtactaaaagtaagcatgaaaagagcgaagtagaaagcgcaccggaagcgaaagctacagaaaatgtgcaagaaacgaacaaagtagaaagcgcaccggaagcgaaagctacagaaagtgtgcaagaaacgaacaaagtagaaagcgcaccggaagcgaaagctacagaaagtgtgcaagaaacgaacaaagtagaaagcgcaccagaagcgaaagctacagaaaatgtgcaagaaacgaacaaagtagaaagtgcacaacaacaagataaaggaaaatcagtagaggcaaatgaaaagtctttttatgatttaagtaaaaaaattgatcaagcagttaataaaaaagaagttgtggaaaagcaagttaaaaagcaattttcgagtgtattatctgaaaaaaaataa

SEQ ID NO: 5636 - protein, 202 aa, Staphylococcus aureus
MKGSSPMRKKSGPINKRVDFLSNRLNKYSIRKFTIGTASILVGSTLIFGIGSGEAKADEKVYTNNENGTKSKHEKSEVESAPEAKATENVQETNKVESAPEAKATESVQETNKVESAPEAKATESVQETNKVESAPEAKATENVQETNKVESAQQQDKGKSVEANEKSFYDLSKKIDQAVNKKEVVEKQVKKQFSSVLSEKK

SEQ ID NO: 5637 - DNA, 435 bp, Staphylococcus aureus
gtgaaacaacaaaaagacgcatcaaaaccagcacacttttttcaccaagtcattgtaattgctttagtactctttgtatcgaaaataattgaatcatttatgccaattcctatgcctgcatcagtaatcggtttagtattattatttgtattattatgtactggtgctgttaagttaggcgaagtcgaaaaagtaggaacgacactaacaaataacattggcttactcttcgtaccagccggtatctcagttgttaactctttaggtgtcattagccaagcaccatttttaatcattggactaataatcgtctcaacaatactattacttatttgtactggctatgtcacacaaattattatgaaagttacttcgagatctaaaggtgacaaagtcacaaaaaaagatcaaaatagaggaggcacaagctcatga

SEQ ID NO: 5638 - protein, 144 aa, Staphylococcus aureus
MKQQKDASKPAHFFHQVIVIALVLFVSKIIESFMPIPMPASVIGLVLLFVLLCTGAVKLGEVEKVGTTLTNNIGLLFVPAGISVVNSLGVISQAPFLIIGLIIVSTILLLICTGYVTQIIMKVTSRSKGDKVTKKDQNRGGTSS

SEQ ID NO: 5639 - DNA, 897 bp, Staphylococcus aureus
ttgccattggatttttataattatgtaaataaatatattagcaataaaatatttaatcatgataattatttaattactaaaaatgaggttataaatttctattttaatcatggtagtgactttaataattttaagaagggacagaaatggacaaagtccaattttaagcagggaaataaacttaaaatacacgaatttatcattgcagtaacttatgtgaacttattaaatcattcatatatgaaatatatcaatgctgaaaattactatgaccctagcaaaaaaataataaaaggaatgaaaaataattatcataaatttacagattcattcagtgattttgtagaaatggtggacgatataacatggagaatacgcgattcgtttgattatattggaggattaaaaaataaagaaattaacgaagatgagaacgaatatatcgaacaattaattcaatttgttatattatctaaattcggctatatgaatgtggaaaatcattttaattatattgagaacttaaatacacttaataacgaattaacgactatattaagaagtgagttcgcccacatctcaaatgatatgtataataatttatttagtaatttattcgatgttgtgaatacatggaaaaaagattattcaaataatttttataataatactcagaatactataactacaaaaaagttagatataatatcttcatttataaaacaatatgataaaccatttgaacgagacgaatatggcaaacatgttaaagcagaagtgtttgaagggataagtgattttcataagcgtgtaaaagaaggatttgctgcaaatgatgtgttattacaattaaggttagaaatgagtgtacatgaaaatgataaatttactagttaa

SEQ ID NO: 5640 - protein, 298 aa, Staphylococcus aureus
MPLDFYNYVNKYISNKIFNHDNYLITKNEVINFYFNHGSDFNNFKKGQKWTKSNFKQGNKLKIHEFIIAVTYVNLLNHSYMKYINAENYYDPSKKIIKGMKNNYHKFTDSFSDFVEMVDDITWRIRDSFDYIGGLKNKEINEDENEYIEQLIQFVILSKFGYMNVENHFNYIENLNTLNNELTTILRSEFAHISNDMYNNLFSNLFDVVNTWKKDYSNNFYNNTQNTITTKKLDIISSFIKQYDKPFERDEYGKHVKAEVFEGISDFHKRVKEGFAANDVLLQLRLEMSVHENDKFTS

SEQ ID NO: 5641 - DNA, 918 bp, Staphylococcus aureus
atggacctaaaaaaatttgaagaattatataaagattatagtgatgatgatgtaatagagcaatttgctatatataaaataacagatgaaaagcaagtaatggaaattactgataaaaaactgaccagtgaagataaacaagtttttcagagaatagctaatttaagttatcaatttaatgtcgtaaaggaaatgtatgattactatctttatgattttcaagtaattactgattatatcaaagataaaagcaacctaaataataagtttaaatctgttgactttgtcaacctatattttttacatttcttatctactgcaagggcattttatcaatatactgaaaacttatttaagtctataggtaaaaaagaatttgaggaatggaaaaataatatatcaaatatttatgataataatttttcttatagattatgttatcaaatgaggaatttcacgcaacatcatggtttggcgattacgaatattaaagaaaaattaaatttaaattgtaacggtgaagaaataaacgactatcaattattcattgatccatctatattactaaatactaactataaatggaataagacagttaagagcgatttagaaaagcataatggattaattgatttttatcaactaataacagattatgatgagtgtataaaaaatatgcttttgtattcatatataggattaataaataagtatagaaatgaattaaatcaattaatgtcaaaagctatgaaaatagaaggagaaatgggtataccttttttaagaaaagctaaaaagaaagaattcagagaatactatgaaaatattgaatttacagaattaaaaggaagtaaggcaataattgatatatttaatatgatgtgtgatttatatactcaactcgagacatctagttaa

SEQ ID NO: 5642 - protein, 305 aa, Staphylococcus aureus
MDLKKFEELYKDYSDDDVIEQFAIYKITDEKQVMEITDKKLTSEDKQVFQRIANLSYQFNVVKEMYDYYLYDFQVITDYIKDKSNLNNKFKSVDFVNLYFLHFLSTARAFYQYTENLFKSIGKKEFEEWKNNISNIYDNNFSYRLCYQMRNFTQHHGLAITNIKEKLNLNCNGEEINDYQLFIDPSILLNTNYKWNKTVKSDLEKHNGLIDFYQLITDYDECIKNMLLYSYIGLINKYRNELNQLMSKAMKIEGEMGIPFLRKAKKKEFREYYENIEFTELKGSKAIIDIFNMMCDLYTQLETSS

SEQ ID NO: 5643 - DNA, 519 bp, Staphylococcus aureus
ttgatttctaatatttcaatttttgcaaaagacgataaaatgcaagttagtgataagtttaatcaaatagtcgctaaaatggattatttaaaaaacaaaaggaatcatttagttcatagttccaaaatagcagaagatgaaaaaaagtttttagaaacctatattaaaatagaaaaatataatgaaagtaatatctatttaaaagatgataaagttaatataaagagaaagttgaatcaaaataattttgattttgaaatggttaaagacatttttgaaatcagagaagaattagttgatttagagatagaagacttaagtattaataatatagaaagctcatatatttttgaaagcactttttttgctgatgtattagatgatgtgaattttgcaaaaaaacaaaatttacaaaaaaaacgtaattcgaaatcacttgaaagtgaaaatgtttacaaagataaaaagaaattgttgaatacagacataaaaacaaaatttgatatggtgacgttatga

SEQ ID NO: 5644 - protein, 172 aa, Staphylococcus aureus
MISNISIFAKDDKMQVSDKFNQIVAKMDYLKNKRNHLVHSSKIAEDEKKFLETYIKIEKYNESNIYLKDDKVNIKRKLNQNNFDFEMVKDIFEIREELVDLEIEDLSINNIESSYIFESTFFADVLDDVNFAKKQNLQKKRNSKSLESENVYKDKKKLLNTDIKTKFDMVTL

SEQ ID NO: 5645 - DNA, 429 bp, Staphylococcus aureus
atgataaaaaaaataaaagatataataaaattggaagttaattatttaaataggattgataaagataatactgacaatgatgggataatattaaaagcaaataacaatgtaaatttaccaaatgaagataatgaagcttatgtagaaattatttttactatgagaagtgtagaatctaattcatgggaaaatgagaaaaataaaaagagaattttagatgatgaaaatgatcaaaatataattggcaaattaagagttaattataaaataatatgtgatttcagtacagagagggaagaaaaaatgagagatgcacttttagaaattatagaaccttatttcagaaaagaagttgaaactttattgtcaaatatgaaattaccaaattttattcttccttacaggttttgggaaaatgaagataactaa

SEQ ID NO: 5646 - protein, 142 aa, Staphylococcus aureus
MIKKIKDIIKLEVNYLNRIDKDNTDNDGIILKANNNVNLPNEDNEAYVEIIFTMRSVESNSWENEKNKKRILDDENDQNIIGKLRVNYKIICDFSTEREEKMRDALLEIIEPYFRKEVETLLSNMKLPNFILPYRFWENEDN

SEQ ID NO: 5647 - DNA, 780 bp, Staphylococcus aureus
atgaagataactaatataagattaaaaagtgcaaataaaaaaagtgttaaaaaactttactttcttgaaggtatagatgctatagaaaaaatagagaataattacgaaaaaaaagtttttttagtctctatacttgaggggatcagacaatactcaacacaaaattataaaatagaatgtgattttaaaaaatttcattatagaatatttcagtattataggataattaagagaaaattaaaagagacagttaaaaattttgatgaaaaacaagtacagacgttatcaaaaatttataataaattatgcaatgttagtgataaaaataattatattggacaaattttggagtatacttatataaaatatatcagaactgaggattctgtgtataaaattggtcatgaaccaatagtatatcataaacgtaaatcactgcatggaaaagaatcttatagcaatagattattagattttgtgactatagagaatagaaagacgataattttatgcgaatgcaaagcgaacttgcaaagagagtttcaaggtttaatcaagcattttaataaaccatttagacagaagttacagttgatgaatcatttagaagataagttaaagcaatgccattctggaaatgaaaaacctaataactttgtagaaatcaaaaaagtattagtaactgcatttgcgccgactaatcaacaaaacttacctagaagatatcaacgagaaatacccatacttacaattagcgatatgaaaaatatggtgttataa

SEQ ID NO: 5648 - protein, 259 aa, Staphylococcus aureus
MKITNIRLKSANKKSVKKLYFLEGIDAIEKIENNYEKKVFLVSILEGIRQYSTQNYKIECDFKKFHYRIFQYYRIIKRKLKETVKNFDEKQVQTLSKIYNKLCNVSDKNNYIGQILEYTYIKYIRTEDSVYKIGHEPIVYHKRKSLHGKESYSNRLLDFVTIENRKTIILCECKANLQREFQGLIKHFNKPFRQKLQLMNHLEDKLKQCHSGNEKPNNFVEIKKVLVTAFAPTNQQNLPRRYQREIPILTISDMKNMVL

SEQ ID NO: 5649 - DNA, 243 bp, Staphylococcus aureus
atgaataataaagctttaaaactttatcagcgactttaccaaattgaagagcttgtcggttcaatattcgtgcgtatttcaaaatcagaaattatcaatctaaattacattgatcacttgaagttagaaacaaatggaatggtccatctcactatgaaaaaattattccacgctgttcaaaaaggtgcgttcactggtcttatgatttctgtcattacttcacttatttttttcaagggataa

SEQ ID NO: 5650 - protein, 80 aa, Staphylococcus aureus
MNNKALKLYQRLYQIEELVGSIFVRISKSEIINLNYIDHLKLETNGMVHLTMKKLFHAVQKGAFTGLMISVITSLIFFKG

SEQ ID NO: 5651 - DNA, 393 bp, Staphylococcus aureus
ttggaaaacactaataatctattcgaaagattagaaatattaacaaaaccagaaaatatagaaactacattttttattatccttaaattcattatttttatcatcattctaatgataggagcgttaatagttttaggaatattgaatagcagaagaaattacaaccctgaaaaaatttggaacaaaagaaaaattcgcactcttaaatcagaaattggcggaggacaggaatactattttagatactggatctggcaaagaaataaaagaaaaaatattctaatcgctttaagagattactctccatatgaagaatattatccaagtcaaaaatggctaaaaaaagataaatctaaattaccattccgaagagaaatatgggttataaaataa

SEQ ID NO: 5652 - protein, 130 aa, Staphylococcus aureus
MENTNNLFERLEILTKPENIETTFFIILKFIIFIIILMIGALIVLGILNSRRNYNPEKIWNKRKIRTLKSEIGGGQEYYFRYWIWQRNKRKNILIALRDYSPYEEYYPSQKWLKKDKSKLPFRREIWVIK

SEQ ID NO: 5653 - DNA, 2832 bp, Staphylococcus aureus
gtgaaatttgcagataactggctagcaccgaatcctggttcagatgctgcaattgctcaagcaatgacacatgttattttacaagaacattatgttaatcaacctaatgaacgctttataaattacgctaaacaatatacagatatgccgtttcttatcatgctggatgaagatgaaaatggatataaagcgggtcgatttttaagagcgagtgacttaggtcaaacaacagagcaaggcgaatggaagccagttattcatgatgcaatcagcgatagtttagtagtacctaatggcacaatgggtcaacgttgggaagaaggtaagaagtggaacttaaaactagaaacagaagatggttctaaaattaaccctacattatcaatggcagaaggtggatacgaattagaaacaattcaattcccatactttgatagtgatggagatgggatattcaatcgtccaattccaactcgacaagtcactttagcaaatggtgacaaagtccgtattgctacaatttttgacttaatggcaagtcaatatggcgtgcgtcgttttgatcataaattagaatcaaaaggatacgacgatgcagaatcaaaatatacacctgcttggcaagaagccatttcaggcgtaaaacaaagtgttgtcattcaagtagcgaaagaatttgcgcaaaacgctatcgatactgaagggcgttcaatgattatcatgggtgcgggtattaaccattggtttaactcagatacgatttatcgttcaatcttaaacttagttatgttatgtggctgtcaaggtgtgaatggtggcggttgggctcactatgtgggacaagaaaaatgtcgtccgattgaaggatggagtactgtcgcatttgcgaaagactggcaaggaccaccacgtttgcaaaatggaacaagttggttctattttgcaacagaccaatggaaatatgaagagtcaaatgtagatcgtttaaaatctccattagctaaaacagaggatttaaagcatcaacacccagctgattataatgttttagcagctagacttggttggttaccatcatatccacaatttaataaaaatagtttgttgtttgcagaagaagctaaagatgaaggcattgagtcgaatgaggcaattttaaaacgagcgataaatgaagttaagtcaaaacaaacgcaatttgcgatagaagatccggatttgaaaaagaatcatccgaaatcactgtttatatggcgctcaaatctaatctcaagttctgcaaaaggtcaagaatactttatgaagcatttacttggcacaaaatcagggttattagctacaccaaatgaagatgaaaagccagaagaaattacgtggcgtgaggaaacaacagggaaattagatttagtcgtttctttagatttcagaatgacagcaacacctttatattctgacattgttttgccagcagcgacttggtatgagaagcatgatttgtcatctacagatatgcatccatatgtacatccttttaatccagctattgatccattatgggaatcgcgttcagactgggatatttataaaacgttggcaaaagcattttcagaaatggcaaaagactatttacctggaacgtttaaagatgttgtgacaactccacttagtcatgatacaaagcaagaaatttcaacaccatacggcgtagtgaaagattggtcgaagggtgaaattgaagcggtacctggacgtacaatgcctaactttgcaattgtagaacgcgactacactaaaatttacgacaaatatgtcacgcttggtcctgtacttgaaaaagggaaagttggagcacatggtgtaagtttcggtgtcagtgaacaatatgaagaattaaaaagtatgttaggtacgtggagtgatacaaatgatgattctgtgagagcgaatcgtccgcgtattgatacagcacgtaatgtagcagatgcaatactaagtatttcatctgctacgaatggtaaattatcacaaaaatcatatgaagatcttgaagaacaaactggaatgccgttaaaagatatttctagcgaacgtgctgctgagaaaatttcgtttttaaatataacttcacaaccacgagaagtaataccgacagcagtattcccaggttcaaataaacaaggtcgacgatattcaccatttacaacgaatatagaacgtctagtaccttttagaacattaacaggacgtcaaagttattatgtggatcacgaagttttccaacaatttggggagagcttaccagtatataaaccgacattgccgccaatggtatttgggaatagagataagaaaattaaaggtggtacagatgctttggtactgcgttatttaacgcctcatggaaaatggaatatacactcaatgtatcaagataataagcatatgttgacactatttagaggtggtccaacggtttggatatcaaatgaagatgctgaaaaacacgatatccaagataatgattggctagaagtgtataaccgtaatggtgttgtaacggcaagagcagttatttcgcatcgtatgcctaaaggtacaatgtttatgtatcatgcacaagataaacatattcaaacgcctgggtcagaaattacagatacacgtggtggttcacacaacgcgccgactagaatccatttgaaaccaacacaactagtcggaggatacgcacaaattagttatcactttaattattatggaccaattgggaaccaaagggatttatatgtagcagttagaaagatgaaggaggttaattggcttgaagattaa

SEQ ID NO: 5654 - protein, 943 aa, Staphylococcus aureus
MKFADNWLAPNPGSDAAIAQAMTHVILQEHYVNQPNERFINYAKQYTDMPFLIMLDEDENGYKAGRFLRASDLGQTTEQGEWKPVIHDAISDSLVVPNGTMGQRWEEGKKWNLKLETEDGSKINPTLSMAEGGYELETIQFPYFDSDGDGIFNRPIPTRQVTLANGDKVRIATIFDLMASQYGVRRFDHKLESKGYDDAESKYTPAWQEAISGVKQSVVIQVAKEFAQNAIDTEGRSMIIMGAGINHWFNSDTIYRSILNLVMLCGCQGVNGGGWAHYVGQEKCRPIEGWSTVAFAKDWQGPPRLQNGTSWFYFATDQWKYEESNVDRLKSPLAKTEDLKHQHPADYNVLAARLGWLPSYPQFNKNSLLFAEEAKDEGIESNEAILKRAINEVKSKQTQFAIEDPDLKKNHPKSLFIWRSNLISSSAKGQEYFMKHLLGTKSGLLATPNEDEKPEEITWREETTGKLDLVVSLDFRMTATPLYSDIVLPAATWYEKHDLSSTDMHPYVHPFNPAIDPLWESRSDWDIYKTLAKAFSEMAKDYLPGTFKDVVTTPLSHDTKQEISTPYGVVKDWSKGEIEAVPGRTMPNFAIVERDYTKIYDKYVTLGPVLEKGKVGAHGVSFGVSEQYEELKSMLGTWSDTNDDSVRANRPRIDTARNVADAILSISSATNGKLSQKSYEDLEEQTGMPLKDISSERAAEKISFLNITSQPREVIPTAVFPGSNKQGRRYSPFTTNIERLVPFRTLTGRQSYYVDHEVFQQFGESLPVYKPTLPPMVFGNRDKKIKGGTDALVLRYLTPHGKWNIHSMYQDNKHMLTLFRGGPTVWISNEDAEKHDIQDNDWLEVYNRNGVVTARAVISHRMPKGTMFMYHAQDKHIQTPGSEITDTRGGSHNAPTRIHLKPTQLVGGYAQISYHFNYYGPIGNQRDLYVAVRKMKEVNWLED

SEQ ID NO: 5655 - DNA, 156 bp, Staphylococcus aureus
atgacaataaaggaattagaagagaagtttaacatctctcgatattttgttgtaaagcatgatagggattgggaaacaggtgaaattattgacacttgtattgttttagatgaatatgcggaccatatcaacatagaagttgaggaagtgatctaa

SEQ ID NO: 5656 - protein, 51 aa, Staphylococcus aureus
MTIKELEEKFNISRYFVVKHDRDWETGEIIDTCIVLDEYADHINIEVEEVI

SEQ ID NO: 5657 - DNA, 411 bp, Staphylococcus aureus
atgattccaaatcctaatgcgccagatgaatataaatatgaaactgattatagaaaaataccaagaaaatatttaaaccctaaaatccctcaagggcgtggaaaaatcaaatggcaagcttttgcgactctcccgcaacagtttgaaattttagaacaaattataaaggatcaaaataaaatagaaaaaccattgctaacacatgattcattagataatttagatcagatttttcaaataaaaattcaaaatgatgagttatgtacaatctcatattgggaagacggcagcatttcaaactatacaggaaaaattttgaaaattgatacaatcaatggttattttacattttacgattctacaaatactaaacatacttttttcaatactaatgtgtataatatctcttaa

SEQ ID NO: 5658 - protein, 136 aa, Staphylococcus aureus
MIPNPNAPDEYKYETDYRKIPRKYLNPKIPQGRGKIKWQAFATLPQQFEILEQIIKDQNKIEKPLLTHDSLDNLDQIFQIKIQNDELCTISYWEDGSISNYTGKILKIDTINGYFTFYDSTNTKHTFFNTNVYNIS

SEQ ID NO: 5659 - DNA, 675 bp, Staphylococcus aureus
atgacttttggagatagaataagaaatttaaggaagcaaaaaggtttgactttacaacaacttagcgatgaactgcatgaaaaattcccttcaaaggacaagaaaaacagttttactaaaggtaaattgtccaattgggaaaataacaaatcagaacccatagcgaaaactgtatctcaactagcttcttacttcggtgtaagcatggattatttaattggtttagaagatgatattgttccattagaaaacattaatcattactatcaagtgccattttatggaaaagtttctgctggaaattttgagacagtcgaaattgaaacaaaagattttgatattccagacgtagcctttaatggtcgtaagcctagtgaatgcatagcgttacaaataaatggtgatagcatgaacaaaatacttgctaacggttcttatataattgtccatgattatagaaagtcttgtgatcataaacttaacagcaatgacatccttgtattacgtctaggtggtgaatatacagttaagcgtgtgagacgtactgaaacaaaactacatttagacccagtaagctattcagatgaatttaaaactaattcttacgatttagattctattgatgaaatcgaagtgataggcaaagttatttataactatcgaatttttgattaa

SEQ ID NO: 5660 - protein, 224 aa, Staphylococcus aureus
MTFGDRIRNLRKQKGLTLQQLSDELHEKFPSKDKKNSFTKGKLSNWENNKSEPIAKTVSQLASYFGVSMDYLIGLEDDIVPLENINHYYQVPFYGKVSAGNFETVEIETKDFDIPDVAFNGRKPSECIALQINGDSMNKILANGSYIIVHDYRKSCDHKLNSNDILVLRLGGEYTVKRVRRTETKLHLDPVSYSDEFKTNSYDLDSIDEIEVIGKVIYNYRIFD

SEQ ID NO: 5661 - DNA, 240 bp, Staphylococcus aureus
atgaacggatataacaagttgaaaggtttgttaacagaaagaggcatcaagaataaagatttagccgaattacttgatataaatagaacaactgttaataaaaaactaaatcgaactaatgggaacgacttttcaatgtcagaagtaagagcaatttgtttgtacttagatatcagtgcagacatatattttttaaatcaaagtcgtgaaaacacgacaaaagaaaaacaaacgctttaa

SEQ ID NO: 5662 - protein, 79 aa, Staphylococcus aureus
MNGYNKLKGLLTERGIKNKDLAELLDINRTTVNKKLNRTNGNDFSMSEVRAICLYLDISADIYFLNQSRENTTKEKQTL

SEQ ID NO: 5663 - DNA, 372 bp, Staphylococcus aureus
atgttttatgaagatgagaaagaattacatgctaggtttcaaaagattaaagataatttctttgagactttaaaagaaaaaatgccagtctttaataaaggcatgtggtatttatatattttaaaattagaatatgattttatctatgttggtattactagtgatccacgaaaaagaataagaaaacatttttttggaaagggagcgaagataactcaaaaatttatgccattagaagtattagatattattgaatgtagaccagtaagagatgaagtagaacatgttgaaaacattgttactgaaaatttgtttgatgtatatggcagagataaagtttttggagggaagtattgtaatactaaaaaataa

SEQ ID NO: 5664 - protein, 123 aa, Staphylococcus aureus
MFYEDEKELHARFQKIKDNFFETLKEKMPVFNKGMWYLYILKLEYDFIYVGITSDPRKRIRKHFFGKGAKITQKFMPLEVLDIIECRPVRDEVEHVENIVTENLFDVYGRDKVFGGKYCNTKK

SEQ ID NO: 5665 - DNA, 657 bp, Staphylococcus aureus
atgagtttgcggtcgcaaatgaacggagagaattcgaacaacagttatcaaaacacgagccaaccgaaaccgagcacagatttagagacacagaaacgcattttgaacgtcctagaaaacttagaatcaaatcacgagaagacgactttgaacttgagtaatgacgacaagttatatatcactagattaactgaacggataaaacgctcaaatgagcataaaatcaatattgagattgatgataagttaggcaaattgatacaacaaaaaattgataaaaacctcgataaaaaaattccagattttcattcaacgcaaacaatggagcgattcaagcaatctttgttaagtattgagcagaaacaagaaagactagatgatagccttgagagcgtacacaaatggtctatgtactttaaatcgctattgatgttgtcgttatttgcagttttatttattggtgtagtaggaacgtttatgggagggatttttaatgccttaggtgttcaacatgtgtatcaaggcttagaataccaaataaagcactcagaaggctttgtagcgtttttgtggcatttaggatatatcataccttatttaatgttagcagggcttatatggcttctatttgctttgaatgacaaatttaaatattag

SEQ ID NO: 5666 - protein, 218 aa, Staphylococcus aureus
MSLRSQMNGENSNNSYQNTSQPKPSTDLETQKRILNVLENLESNHEKTTLNLSNDDKLYITRLTERIKRSNEHKINIEIDDKLGKLIQQKIDKNLDKKIPDFHSTQTMERFKQSLLSIEQKQERLDDSLESVHKWSMYFKSLLMLSLFAVLFIGVVGTFMGGIFNALGVQHVYQGLEYQIKHSEGFVAFLWHLGYIIPYLMLAGLIWLLFALNDKFKY

SEQ ID NO: 5667 - DNA, 189 bp, Staphylococcus aureus
atgggaaagaatttagaaatagtaacaagcttatttgtattaatacttgctataggcttttcaatttggaatttttataaccattcatatacaacagccataattatgttagttattggagtaatcaatattggttatttaattcaagaaataatagaaaaacgacgtgatgatgatggcaacaactaa

SEQ ID NO: 5668 - protein, 62 aa, Staphylococcus aureus
MGKNLEIVTSLFVLILAIGFSIWNFYNHSYTTAIIMLVIGVINIGYLIQEIIEKRRDDDGNN

SEQ ID NO: 5669 - DNA, 330 bp, Staphylococcus aureus
atgaataacgaagaattggaatctaaacttttattaattaaacaatcgatagatgctttacaggaggaactagcacctaatctaaaaacaaaagatttagttttattgcgttatggttataacgttgacgaaattaaaaagttgaatgattatttgtttaaattaacaatgaataaaaatagagtaactaaaaaagaatttgaagagtttttgtgtagtataagaaatgttcctgaaattccgaatagacaagttattgatattttggaaggttataaaaatagtgatctttatgtagatttaattgactatattttgaatagtgattaa

SEQ ID NO: 5670 - protein, 109 aa, Staphylococcus aureus
MNNEELESKLLLIKQSIDALQEELAPNLKTKDLVLLRYGYNVDEIKKLNDYLFKLTMNKNRVTKKEFEEFLCSIRNVPEIPNRQVIDILEGYKNSDLYVDLIDYILNSD

SEQ ID NO: 5671 - DNA, 258 bp, Staphylococcus aureus
atgcaaaataaaaagactactcattttttgagtagccagggaattgtttttgatatattaaatgaaaggagtaatacattaatcatatcacacgcatttatgccgagaaaatttttggttggaatgagctatgtgttagctaactatgttagcgagttggttggtggtttgttgggattaatcccaacgaagtaccaactcaacaacacattatgctccgttggttccaaccaaaaagcaattggaataaagcaataa

SEQ ID NO: 5672 - protein, 85 aa, Staphylococcus aureus
MQNKKTTHFLSSQGIVFDILNERSNTLIISHAFMPRKFLVGMSYVLANYVSELVGGLLGLIPTKYQLNNTLCSVGSNQKAIGIKQ

SEQ ID NO: 5673 - DNA, 282 bp, Staphylococcus aureus
atgattgttgctattttaatgatagagaaccaaaattctaactctccaaatagtctcgcactcaataagttaaaagacattaataacaatacgcaaaaaagtgcactaatccagtttggaatttctgggaaccagaagcttacatactttgctacagctgttacttcagccatacctgtaataatccaacagaaccagtatgtccaaccggttacgaatcctgcaaaaggcccaatgtatgtattggttacatctgcgaaagatttaaattcagtattttga

SEQ ID NO: 5674 - protein, 93 aa, Staphylococcus aureus
MIVAILMIENQNSNSPNSLALNKLKDINNNTQKSALIQFGISGNQKLTYFATAVTSAIPVIIQQNQYVQPVTNPAKGPMYVLVTSAKDLNSVF

SEQ ID NO: 5675 - DNA, 216 bp, Staphylococcus aureus
atgaatatcatgcaattcaaaagcttattgaaatcgatgtatgaagagacaaagcaaaatgacccgattgtagcaaatgtctatatagaaactggttgggcagttaacagattgttagacaataacgagttatcgcctttcgatgattacgacagagttgaagagaaaattatgaatgaaatcaattggaagaaaacgcacattaaggagtgttaa

SEQ ID NO: 5676 - protein, 71 aa, Staphylococcus aureus
MNIMQFKSLLKSMYEETKQNDPIVANVYIETGWAVNRLLDNNELSPFDDYDRVEEKIMNEINWKKTHIKEC

SEQ ID NO: 5677 - DNA, 357 bp, Staphylococcus aureus
atgccgatgagcaaaacacaagcattagaaattattaaaaaagttaggtacgtatacaacattgattttgataaaccgaagttagaaatgtggattgatgtattaagtcaaaatggagattatcaaccaactgtaaaagcggtagatgtttatatcaacagtaacaacccgtacccgcctaacttaccagcaatcatgcgtaaggaacctaaaaaagtatctatcgagccagtagataacgaaaccgctacacaccaatggaaaatgcagaatgaccccgaatatgtcagacaaagaaaaatagcgctagataagttcatgaataagttggcagaatttgggggcgaaaacgaatga

SEQ ID NO: 5678 - protein, 118 aa, Staphylococcus aureus
MPMSKTQALEIIKKVRYVYNIDFDKPKLEMWIDVLSQNGDYQPTVKAVDVYINSNNPYPPNLPAIMRKEPKKVSIEPVDNETATHQWKMQNDPEYVRQRKIALDKFMNKLAEFGGENE

SEQ ID NO: 5679 - DNA, 720 bp, Staphylococcus aureus
atggataaaaaagaattagcgaaatttataggcaataaaatcagatactatagaaccaaattgaacttaactcaagatcaacttggagaaaaactcaacactaaaaaggctactatttcaaattatgagacagggtacagaactcctaaacaagatgatttgtttgaaattgctcatattttaaatatcagtatcgatgatttgtttcctacaagaaataataaaaaaaacgacatcacttccatatacagtaaactcacgcctccaagacaaagcaatgtactaaaatatgcgactaatcaattagaagaacaaaataatgacagtgataatctggtagatttcaattcttacattcaagaaaaatccgaagtggatatatatggttgtgcgtcagctggtattggcgaaagattatataacgagcctatttcaaaagaattcgtaagaggttatgtccccgcacatgatatagctttaaaagtaaatggagactcaatggagccgttatttaaaaacggacaaattatattcattgaaaaatctcacactatcaaagatggacaaataggcgtctttattataaatggagatgcttacgtaaagaaagtttatgtagaagataatagattaacgttggtttctttaaataaaaagtataaagatttatatttttatgataacgaaagtgtgaggttagttggaaaagttattttatag

SEQ ID NO: 5680 - protein, 239 aa, Staphylococcus aureus
MDKKELAKFIGNKIRYYRTKLNLTQDQLGEKLNTKKATISNYETGYRTPKQDDLFEIAHILNISIDDLFPTRNNKKNDITSIYSKLTPPRQSNVLKYATNQLEEQNNDSDNLVDFNSYIQEKSEVDIYGCASAGIGERLYNEPISKEFVRGYVPAHDIALKVNGDSMEPLFKNGQIIFIEKSHTIKDGQIGVFIINGDAYVKKVYVEDNRLTLVSLNKKYKDLYFYDNESVRLVGKVIL

SEQ ID NO: 5681 - DNA, 132 bp, Staphylococcus aureus
atgactggaaacataagcacaggcaaactgttctttaaagcagttgcagagattactaaagggaatgtgaaagctgaaaatactggcgaaaaaggttcttttagtaatttaggcaattgtataatgatgtaa

SEQ ID NO: 5682 - protein, 43 aa, Staphylococcus aureus
MTGNISTGKLFFKAVAEITKGNVKAENTGEKGSFSNLGNCIMM

SEQ ID NO: 5683 - DNA, 1539 bp, Staphylococcus aureus
atgaaaaagaaattaggtatgttacttcttgtaccagccgtaactttatcattagccgcatgtgggaatgatgatggaaaagataaagatggcaaggtaacaattaaaacgacagtttatccattgcaatcatttgcagagcaaattggtggaaaacacgtgaaggtatcatcaatctatccagcagggacagatttacatagctatgaaccaacacaaaaagatatattaagtgcaagcaagtcagacttgtttatgtatacaggggataatttagatccggttgctaagaaagttgcatctactattaaagataaagataaaaaactgtctttagaagataaattagataaagcaaagcttttaactgatcaacacgaacatggtgaagagcatgaacatgagggacatgatcatgggaaagaagaacatcatcatcatggcggatatgatccacacgtatggttagatcctaaaattaaccaaactttcgctaaagaaattaaagatgaattagtgaagaaagatccaaaacataaagatgactatgagaaaaactacaaaaaattaaacgatgatcttaagaaaattgataacgatatgaagcaagttactaaagataagcaaggtaatgcagtattcatttcacatgaatcaattggatacttagctgatcgttatggttttgttcaaaaaggtattcaaaacatgaatgctgaagatccatcacaaaaagaattgactaaaattgttaaagaaattagagatagcaatgctaaatatattctttacgaagataatgttgcgaataaagtgactgaaacaattcgtaaagaaacagatgcgaagcctttaaaattctacaacatggagtctttaaataaagaacaacagaaaaaagataatattacctatcaatcattaatgaaatcgaatattgaaaatatcggtaaagctttagacagtggtgttaaagtgaaagacgacaaagctgaaagtaaacacgacaaagcaatttctgatgggtattttaaagatgagcaagttaaagaccgtgaattaagcgattatgctggtgaatggcaatctgtttacccttacttaaaagacggtacgcttgatgaagtgatggaacataaagctgaaaatgatccgaagaaatctgctaaagatttaaaagcttattatgacaaaggatataaaactgatattactaacattgatataaaaggaaatgaaattacatttactaaagatggtacgaaacacactggtaaatatgaatacaatggtaagaaaacattgaaatatcctaaaggtaaccgtggcgtgagatttatgtttaaattggtcgatggtaatgataaagacttaccgaaattcatccaatttagcgatcacaacattgcacctaaaaaggcagaacacttccatatctttatgggtaatgataatgacgcgttattaaaagaaatggataactggccaacatattatccttcaaaattaaataaagaccaaatcaaagaagaaatgtaa

SEQ ID NO: 5684 - protein, 512 aa, Staphylococcus aureus
MKKKLGMLLLVPAVTLSLAACGNDDGKDKDGKVTIKTTVYPLQSFAEQIGGKHVKVSSIYPAGTDLHSYEPTQKDILSASKSDLFMYTGDNLDPVAKKVASTIKDKDKKLSLEDKLDKAKLLTDQHEHGEEHEHEGHDHGKEEHHHHGGYDPHVWLDPKINQTFAKEIKDELVKKDPKHKDDYEKNYKKLNDDLKKIDNDMKQVTKDKQGNAVFISHESIGYLADRYGFVQKGIQNMNAEDPSQKELTKIVKEIRDSNAKYILYEDNVANKVTETIRKETDAKPLKFYNMESLNKEQQKKDNITYQSLMKSNIENIGKALDSGVKVKDDKAESKHDKAISDGYFKDEQVKDRELSDYAGEWQSVYPYLKDGTLDEVMEHKAENDPKKSAKDLKAYYDKGYKTDITNIDIKGNEITFTKDGTKHTGKYEYNGKKTLKYPKGNRGVRFMFKLVDGNDKDLPKFIQFSDHNIAPKKAEHFHIFMGNDNDALLKEMDNWPTYYPSKLNKDQIKEEM

SEQ ID NO: 5685 - DNA, 222 bp, Staphylococcus aureus
atgaattttggacaaaacctttataactggtttctatcaaacgctcaatcactggtgcttttagcaatcgttgtgattggcttgtatcttggcttcaagcgtgagtttagcaaactgattggctttttaattattgcgattattgcggttggcttagtcttcaacgctgctggagtaaaagacattttactagagctattcaatcgcattattggtgcttaa

SEQ ID NO: 5686 - protein, 73 aa, Staphylococcus aureus
MNFGQNLYNWFLSNAQSLVLLAIVVIGLYLGFKREFSKLIGFLIIAIIAVGLVFNAAGVKDILLELFNRIIGA

SEQ ID NO: 5687 - DNA, 582 bp, Staphylococcus aureus
atgaatcggcagtccactaagaaagctttactaataccatttgtcatcatgatcatcacagcaattgttttaatgggtgtatggtttatctttaatagtcttatagcattaattgcatctatcgttcttgtcgtgatgattattgttagcatcgttttattcagacaagctttaatgaaaatggatagttatgtagatggtttgagtgctcaaatttcaacaacaaataataaagcaatcaaacatttaccaattggtatcattgttttagatgaaaatgatcacatcgaatgggttaaccaatttatgacagatcatatggaagcaaacgtcatttctgaatctgtaaatgaagtatttccaaacattttaaagcaattagatagagtgaaatccgttgaaatagaatataatcagtatcatttccaagtacgttattctgagaatgatcactgcctctatttctttgatataactgaacaagtacaaacaaatgaactatatgaaaattctaaaccaatcattgcgacattatttttagataactacgatgagattacgcaaaatatgaatgatacgtag

SEQ ID NO: 5688 - protein, 193 aa, Staphylococcus aureus
MNRQSTKKALLIPFVIMIITAIVLMGVWFIFNSLIALIASIVLVVMIIVSIVLFRQALMKMDSYVDGLSAQISTTNNKAIKHLPIGIIVLDENDHIEWVNQFMTDHMEANVISESVNEVFPNILKQLDRVKSVEIEYNQYHFQVRYSENDHCLYFFDITEQVQTNELYENSKPIIATLFLDNYDEITQNMNDT

SEQ ID NO: 5689 - DNA, 498 bp, Staphylococcus aureus
atgaaagtttctttgattgctgcgatggataagaatagagtgattggcaaagagaatgacattccttggaggattcccaaggactgggaatatgttaaaaatactacaaagggacatccgataatattaggtaggaagaaccttgaatcaatcggaagagccttacctgacagaagaaatattattctgacgagagataaggggtttacctttaatggttgtgaaattgttcattcaatagaagatgtttttgagttatgtaaaaacgaagaagaaatttttattttcggaggagaacagatttataatttgtttttcccttatgttgagaaaatgtacatcacaaaaatacatcatgaattcgaaggagatactttttttccagaagtgaattatgaggaatggaatgaggtatttgcccaaaaagggataaagaatgataaaaatccgtataactactattttcatgtatatgaaagaaaaaacttattgagttaa

SEQ ID NO: 5690 - protein, 165 aa, Staphylococcus aureus
MKVSLIAAMDKNRVIGKENDIPWRIPKDWEYVKNTTKGHPIILGRKNLESIGRALPDRRNIILTRDKGFTFNGCEIVHSIEDVFELCKNEEEIFIFGGEQIYNLFFPYVEKMYITKIHHEFEGDTFFPEVNYEEWNEVFAQKGIKNDKNPYNYYFHVYERKNLLS

SEQ ID NO: 5691 - DNA, 1953 bp, Staphylococcus aureus
atgaccaagcttaaaagattagccacgaaggaagatgaaattgtagatgttaaaattccgatttcaaacgaagaattaaaagatagggctaaacaatatgatttattaactccaaaacgatttgcaacaaggtataacaaaatgttgttcttgccaacgtcttttaaatggaacggttctgaatatcccattcaatataattactgcatcaatccgttttgttgtaattttgggaaagaacagcacaaattcaaagatgtaaaagggaaaccaagtcgatataaaatgactggtagttccaaagataaaggtcataaaggtatgtactgcaatgacaatcctattggcagaggtgtatcgcaaaactgtacagtaacccctttatctaattggtctgttgttgaagaaattaaacgccttatagaaatcaatagcatccaagatgttgagccagattatcaatttcataaagaaggctgctcggaagaagaatcaaccccattcaatgagccgaagcaattttacaaaagggggaaaagtaggggcaaatctcaacgctatcaatgtaaggcgtgtaagaagttcactaatgttctaccaaaaagagaagaaaccactacttatcaccaacaaaagaacaccattcttccaatgttcgctaagatggttgttggaagggtttcagtcagtcgtacttgtgatattttaggaattggagttggaacctactatcataagctggagtggctgtataggcgttgtttggagtttttagaacgatatgagacacaaccccttcaaacaaagaaatttaacgagatgtggcttaatacggacaagatgcactactacctaaataacgtccgtaagaaaggacaaggttcaaagaaatatacggggtttgaagaccttaatatgcaaacgtatatagttgtatctgctgaggtcttatcaagatatgtgttccgttctgatgttgcctatgattggaatatttcaatggatgaattaaatgaagatacaagaaaattcaaagaagaccatctcaatacttttagtcgtaaaaatgataggttagattggtcttattatccacaagaaccatccgctaacgatagcgaaaataggaatgcttatcttcacgaattagggaaaattactaataggagtagatttgtcgatggtttaaatgttgatgctccttatactacaactgctcactattggttaattaaacaaatggttaatgccgacgaatggcgaatgattagtgatgatgacttctctattagaaacgccttttatagagtattcacgaaagaattaaggttgagcgatgcacatcattttatttgccaagttaacaagacgaaaagcagaaaacaatgcttaaaagaattcggacaagcaaaagcagaactgctcgattggggagatatcagaggattcaaaacaaagtttctacggactttggcatctcattatctaactgaattactaacaagtcatcaattccacgaagaggctattagtaaagatggagaaagatatcgcaaatatgccgataaccctatcaaacatccattagccactaaggataaaggattttattcagttgattgtagaacggatttatctgctctggaaccaaacgaaatcgcaaagatgctattaaatgttaatgaccattcgaccaatagctttattcaacagataagacgttatatatcatctcttgaaagaccattaacaacagctcgtggtgataagaagagctatatttacgctaacttcaatccgaagtatgctcaatttgcgattacaattctaagaacttactacaacttttgtcgcccttttaaatcagcggataaaaaggttttgacacctgctcaaagattagggattacagataaacaatttgattggaaagatataatttatttcaaatga

SEQ ID NO: 5692 - protein, 650 aa, Staphylococcus aureus
MTKLKRLATKEDEIVDVKIPISNEELKDRAKQYDLLTPKRFATRYNKMLFLPTSFKWNGSEYPIQYNYCINPFCCNFGKEQHKFKDVKGKPSRYKMTGSSKDKGHKGMYCNDNPIGRGVSQNCTVTPLSNWSVVEEIKRLIEINSIQDVEPDYQFHKEGCSEEESTPFNEPKQFYKRGKSRGKSQRYQCKACKKFTNVLPKREETTTYHQQKNTILPMFAKMVVGRVSVSRTCDILGIGVGTYYHKLEWLYRRCLEFLERYETQPLQTKKFNEMWLNTDKMHYYLNNVRKKGQGSKKYTGFEDLNMQTYIVVSAEVLSRYVFRSDVAYDWNISMDELNEDTRKFKEDHLNTFSRKNDRLDWSYYPQEPSANDSENRNAYLHELGKITNRSRFVDGLNVDAPYTTTAHYWLIKQMVNADEWRMISDDDFSIRNAFYRVFTKELRLSDAHHFICQVNKTKSRKQCLKEFGQAKAELLDWGDIRGFKTKFLRTLASHYLTELLTSHQFHEEAISKDGERYRKYADNPIKHPLATKDKGFYSVDCRTDLSALEPNEIAKMLLNVNDHSTNSFIQQIRRYISSLERPLTTARGDKKSYIYANFNPKYAQFAITILRTYYNFCRPFKSADKKVLTPAQRLGITDKQFDWKDIIYFK

SEQ ID NO: 5693 - DNA, 285 bp, Staphylococcus aureus
gtgttaaaatggttacaatttactaagcaaaaaggggtgcattttcctatgcaatttcttgagccaaaaaataagaacgctaagtctgtggattgggaaatatcagagcaagtaagggtgatagttaagcaatacgctgaatatgcagagcgtactgaaagcgaagcagtggatgaattcttattgaacattttagacgataagaagtttattgaatggattgccaacaagcgaagtaataagcggattgttgaaaaaatgggtatcaaagatagagtgggttga

SEQ ID NO: 5694 - protein, 94 aa, Staphylococcus aureus
MLKWLQFTKQKGVHFPMQFLEPKNKNAKSVDWEISEQVRVIVKQYAEYAERTESEAVDEFLLNILDDKKFIEWIANKRSNKRIVEKMGIKDRVG

SEQ ID NO: 5695 - DNA, 2160 bp, Staphylococcus aureus
atgatggctataaaatttataagacaatacgatgaaaaggattgtggtcctacttgccttgccatgatttcacagttttatggtaagcgtgtatctatcccacgtttgcgcgaatatgctaaaacagataaattaggtacaaatttatatggtctcgtacaagcaggtaaaaagattggtattgagttaactggcgtaaaagctgattcctttgatgatttaaaacaagcacaattaccagttatggtacatattattaatcaacaaggttatgatcactatatcattattgaaaaaataaaaaataacacgctttatattgtcgatcctgctaaaggtaaatataagttatcaagtactgaatttggaaaatattggactaatattgctgtattaattgataaaacagatgattttactactgacaatgaatcaccctcgtatcttaatatttttattgatatatttaaaaataattatggaaagttgttatttattgcttttatctcactatttattaatattgttggtattgtcggggctctatattttaaattattaaccgatcatattattccatccaatgttcttaaaaatttacatattattagcttcggtattttacttttatacataatcaatgcactcattaattatttaaggtttcaacttatcttacatttaagtttgaaaatcgatgttaatttaatgaaagattatttttatcatgttttacatcttccgatgaacttttttgatacacgtaaatctggcgaaatcctacaacgtttcatggatacatctaaaattcgtgaagctttatcatcttcaacggtaacgttgctagttgatactttcatgattattatcggtgctatattactttatatgcaaagtcctttgttactactgataacaattatttttataccttgttttattatttgtagttacactttacgtaaaccttttgaaaaatataatcaaaaggtggctgaaaaagatgctgaattgagttcatatttaatagaatcctttgatggtagtaatactattaaaagttatcaatctgaagacgatcgtttctacattggtactactaaatttaatggtattattgaaaacttattaaaactgggtagattttctaatatacaattaacggttaacaactttttaaaattaactatcagtcttgttatattgtggcttggtagttacttagtcatgacggatagtatgacgttaggtagtttattagcttttaatgccttaactatttattaccttgatcctattgaacgtctcataaatattcaaccaacactgcaatcttcatttgttgcagcacgtcgtattgctgaaataactgatttagagaccgaaactgaattatatacttctaaacaaccttatacttttaaaaacaacattcgcattgaaaatgtaaactttcagtatggctttcgaagtgtggtattgaaggatattaatttaaatattaaaaaagggcaaaaggttgctattgttggtgaaagtggtagtggtaaatcaactataggtaagttactcaatcgctattacactgcttcagaaggtaatattatgattgataactatattattgatgatattgatctttctgacttacgtaagaatataggctatgtttcacaaaacacattcctttttgctgatacaattaaaaacaatcttttacatggtagcaataaatacaaaagtgatgaagatatcgttaaagcttgtcaattagcagaatccttagattttatacagaaattcccagatcagtttaacactatgttagaaaaagaaggagctaatctatcgggcggacaaggccaacgcttatctttagcacgtacatttttaaaagatcctgatatatatattttcgatgaagctacaagtgccttagatagtttaactgaaaacaaaattatggagcatattgacttactaactcaacatggtaaaaccgtaattattatttcacataaattaagtactataaaaaatgctgataatatctatgttttaaacgagggtcaaattgctgagaatggtacacatgatgagttgattcatttaaacggtatatataaaaatttatggcaacttcaaatgaaaatagactga

SEQ ID NO: 5696 - protein, 719 aa, Staphylococcus aureus
MMAIKFIRQYDEKDCGPTCLAMISQFYGKRVSIPRLREYAKTDKLGTNLYGLVQAGKKIGIELTGVKADSFDDLKQAQLPVMVHIINQQGYDHYIIIEKIKNNTLYIVDPAKGKYKLSSTEFGKYWTNIAVLIDKTDDFTTDNESPSYLNIFIDIFKNNYGKLLFIAFISLFINIVGIVGALYFKLLTDHIIPSNVLKNLHIISFGILLLYIINALINYLRFQLILHLSLKIDVNLMKDYFYHVLHLPMNFFDTRKSGEILQRFMDTSKIREALSSSTVTLLVDTFMIIIGAILLYMQSPLLLLITIIFIPCFIICSYTLRKPFEKYNQKVAEKDAELSSYLIESFDGSNTIKSYQSEDDRFYIGTTKFNGIIENLLKLGRFSNIQLTVNNFLKLTISLVILWLGSYLVMTDSMTLGSLLAFNALTIYYLDPIERLINIQPTLQSSFVAARRIAEITDLETETELYTSKQPYTFKNNIRIENVNFQYGFRSVVLKDINLNIKKGQKVAIVGESGSGKSTIGKLLNRYYTASEGNIMIDNYIIDDIDLSDLRKNIGYVSQNTFLFADTIKNNLLHGSNKYKSDEDIVKACQLAESLDFIQKFPDQFNTMLEKEGANLSGGQGQRLSLARTFLKDPDIYIFDEATSALDSLTENKIMEHIDLLTQHGKTVIIISHKLSTIKNADNIYVLNEGQIAENGTHDELIHLNGIYKNLWQLQMKID

SEQ ID NO: 5697 - DNA, 150 bp, Staphylococcus aureus
atgaaaacactaaatgaaaaacaattaaaagatatcaatggtggtaaagggattgttggtgaagtcactggcgaagtcactagtattggtaatgccatttcaaatggttggcatgatttaaaacagtctgtcgctgatactacaaaatag

SEQ ID NO: 5698 - protein, 49 aa, Staphylococcus aureus
MKTLNEKQLKDINGGKGIVGEVTGEVTSIGNAISNGWHDLKQSVADTTK

SEQ ID NO: 5699 - DNA, 1380 bp, Staphylococcus aureus
ttgtttagtttatataaaaaatttaaaggtttgttttatagcgttttattttggctttgtattctttcattttttagtgtattaaatgaaatggttttaaatgtttctttacctgatattgcaaatcattttaatactactcctggaattacaaactgggtaaacactgcatatatgttaactttttcgataggaacagcagtatatggaaaattatctgattatataaatataaaaaaattgttaattattggtattagtttgagctgtcttggttcattgattgcttttattggtcacaatcacttttttattttgatttttggtaggttagtacaaggagtaggatctgctgcattcccttcactgattatggtggttgtagctagaaatattacaagaaaaaaacaaggcaaagcctttggttttataggatcaattgtagctttaggtgaagggttaggtccttcaatagggggaataatagcacattatattcattggtcttacctacttatacttcctatgattacaatagtaactataccttttcttattaaagtaatggtacctggtaaatcaacaaaaaatacattagatatcgtaggtattgttttaatgtctataagtattatatgttttatgttatttacgacaaattataattggacttttttaatactcttcacaatcttttttgtgatttttattaaacatatttcaagagtttctaacccttttattaatcctaaactagggaaaaacattccgtttatgcttggtttgttttctggtgggctaatattttctatagtagctggttttatatcaatggtgccttatatgatgaaaactatttatcatgtaaatgtagcgacaataggtaatagtgttatttttcctggaaccatgagtgttattgtttttggttattttggtggttttttagtggatagaaaaggatcattatttgtttttattttaggatcattgtctatctctataagttttttaactattgcattttttgttgagtttagtatgtggttgactacttttatgtttatatttgttatgggcggattatcttttactaaaacagttatatcaaaaatagtatcaagtagtctttctgaagaagaagttgcttctggaatgagtttgctaaatttcacaagttttttatcagagggaacaggtatagcaattgtaggaggtttattgtcactacaattgattaatcgtaaactagttctggaatttataaattattcttctggagtgtatagtaatattcttgtagccatggctatccttattattttatgttgtcttttgacgattattgtatttaaacgttctgaaaagcagtttgaatag

SEQ ID NO: 5700 - protein, 459 aa, Staphylococcus aureus
MFSLYKKFKGLFYSVLFWLCILSFFSVLNEMVLNVSLPDIANHFNTTPGITNWVNTAYMLTFSIGTAVYGKLSDYINIKKLLIIGISLSCLGSLIAFIGHNHFFILIFGRLVQGVGSAAFPSLIMVVVARNITRKKQGKAFGFIGSIVALGEGLGPSIGGIIAHYIHWSYLLILPMITIVTIPFLIKVMVPGKSTKNTLDIVGIVLMSISIICFMLFTTNYNWTFLILFTIFFVIFIKHISRVSNPFINPKLGKNIPFMLGLFSGGLIFSIVAGFISMVPYMMKTIYHVNVATIGNSVIFPGTMSVIVFGYFGGFLVDRKGSLFVFILGSLSISISFLTIAFFVEFSMWLTTFMFIFVMGGLSFTKTVISKIVSSSLSEEEVASGMSLLNFTSFLSEGTGIAIVGGLLSLQLINRKLVLEFINYSSGVYSNILVAMAILIILCCLLTIIVFKRSEKQFE

SEQ ID NO: 5701 - DNA, 360 bp, Staphylococcus aureus
atgaagaagatgttacgtatatcgattttcataatagtggtctccatatttattgtttttaaatactcttatcaaattgagggaattctagaagaatatccaaatattttaaaagcatttgtagcattattcactctccttacaactgttatcagtcttgttatcgcatataaatcatatgataatagcgttaagcaacaagaaaaagataaagaagaaaaaaacaaacagttcgaagaaaatagcgataggattattaatagtttgaaatctgatttagcaaaatatactaggaaaataaatgtttttagattaggatatacgaattcaggttctgttgcaaacttgaaaatcatataa

SEQ ID NO: 5702 - protein, 119 aa, Staphylococcus aureus
MKKMLRISIFIIVVSIFIVFKYSYQIEGILEEYPNILKAFVALFTLLTTVISLVIAYKSYDNSVKQQEKDKEEKNKQFEENSDRIINSLKSDLAKYTRKINVFRLGYTNSGSVANLKII

SEQ ID NO: 5703 - DNA, 537 bp, Staphylococcus aureus
atgatatcgaataaattaaaatctgcgagattagcaaaggaattaacgcaatctgaggtagctaaaaaattatacgttactagacaaactgtttctcgatgggagcaaggtaaaacgttgcctaatatttatgtaattcaagaattaagcgatctttatgatatttctttagatgaattagtagtaaatacagcattagaaaataaggaggctaaaagtatgaaaaatgtaaatccttttgctttatttggagcgatattatttaatgtgtttttattttctttaatagttatattttttggtggctttttgttattatctttattcatttctttagctatgttatttagtcctttgattttagcaatctttgttttaacgggtgtacaagagtttaatgtaattcaactagttatgactgttattttcgttgttattggtttgttatcaattcctttattgaaaaaagtcagtgtatttttatttaaatttttcaaacgatatttgaaatttaatcataaagcaattttttattga

SEQ ID NO: 5704 - protein, 178 aa, Staphylococcus aureus
MISNKLKSARLAKELTQSEVAKKLYVTRQTVSRWEQGKTLPNIYVIQELSDLYDISLDELVVNTALENKEAKSMKNVNPFALFGAILFNVFLFSLIVIFFGGFLLLSLFISLAMLFSPLILAIFVLTGVQEFNVIQLVMTVIFVVIGLLSIPLLKKVSVFLFKFFKRYLKFNHKAIFY

SEQ ID NO: 5705 - DNA, 657 bp, Staphylococcus aureus
atgacgaaatgggagatctttaaaaaatatatcctgggaaatcctgttatatggattctatgtgtttcaaacgtctttgtatacattgtacgaatcggtattgataactgggcaccgttatatgtgtcagagcatttacactttagtaaaggcgatgcagttaatacgatattctactttgaaattggtgcattagttgcaagtttattatggggctacgtatcagacttattaaaaggtcgtcgtgcaattgtagctattggctgtatgtttatgattacatttgttgtcttattctacacaaatgctacaagtgtcatgatggttaacatttcattgtttgcattaggtgcgttaatctttggtccgcaattattaattggtgtatcattgactggttttgttcctaaaaatgccatcagtgtagcaaacggaatgacaggttcattcgcgtatctattcggtgactcaatggcgaaagttggtttggcggctattgctgatccaacacgtaacggtttaaacatctttggatatacattaagtggatggacagatgttttcatcgtcttctatgttgcattattcctaggcatgattctattaggaatcgttgctttctatgaagaaaagaaaattagaagtttaaaaatttaa

SEQ ID NO: 5706 - protein, 218 aa, Staphylococcus aureus
MTKWEIFKKYILGNPVIWILCVSNVFVYIVRIGIDNWAPLYVSEHLHFSKGDAVNTIFYFEIGALVASLLWGYVSDLLKGRRAIVAIGCMFMITFVVLFYTNATSVMMVNISLFALGALIFGPQLLIGVSLTGFVPKNAISVANGMTGSFAYLFGDSMAKVGLAAIADPTRNGLNIFGYTLSGWTDVFIVFYVALFLGMILLGIVAFYEEKKIRSLKI

SEQ ID NO: 5707 - DNA, 1062 bp, Staphylococcus aureus
atgaccaaagaacaacaacttgcagaacgaattattgctgcagtaggtggtatggataatatagatagtgtcatgaactgtatgacacgtgtgcgtattaaagtattagatgaaaataaagtagatgaccaagaactaaggcacattgatggtgtcatgggtgttatacacgatgaacgcattcaagttgtagttggacctggtacagtcaataaagtggctaatcatatggctgagttaagtggtgttaaactaggtgacccaataccacacaatcacaatgatagtgaaaaaatggactataaatcatatgcagctgataaagcaaaggcaaataaagaagcacataaagcaaaacaaaagaatggtaagttgaataaagtattgaaatcaattgccaatatctttataccgttgattcctgcatttattggagctggattaattggtggtattgcagcagtactgagtaacttaatggtggcaggctatatttcaggtgcttggattacgcaacttataacagtatttaatgtcattaaagacggtatgttagcatacttagctattttcactggtattaatgcggctaaagaatttggtgcgacaccaggacttggtggcgtgattggtggtacaacgttattaacgggtattgctggtaaaaatattttaatgaatgttttcactggagaaccattgcaacctggacaaggtggaattattggtgttatttttgccgtttggattttaagtattgtcgaaaagagattgcataaaattgtgccaaatgcgattgatattattgtaacgccgactattgcattgttgattgtaggactattaactatctttatctttatgccattagcaggttttgtttcagacagtttagtttcagtagttaacggaattattagtattggtggcgtatttagtggatttatcattggtgcaagcttcctaccgttagttatgttagggcttcatcatatttttgcgccaattcatatgttgatttgtcaatttaagtgcaacagttcatcacataaaacttcataa

SEQ ID NO: 5708 - protein, 353 aa, Staphylococcus aureus
MTKEQQLAERIIAAVGGMDNIDSVMNCMTRVRIKVLDENKVDDQELRHIDGVMGVIHDERIQVVVGPGTVNKVANHMAELSGVKLGDPIPHNHNDSEKMDYKSYAADKAKANKEAHKAKQKNGKLNKVLKSIANIFIPLIPAFIGAGLIGGIAAVLSNLMVAGYISGAWITQLITVFNVIKDGMLAYLAIFTGINAAKEFGATPGLGGVIGGTTLLTGIAGKNILMNVFTGEPLQPGQGGIIGVIFAVWILSIVEKRLHKIVPNAIDIIVTPTIALLIVGLLTIFIFMPLAGFVSDSLVSVVNGIISIGGVFSGFIIGASFLPLVMLGLHHIFAPIHMLICQFKCNSSSHKTS

SEQ ID NO: 5709 - DNA, 135 bp, Staphylococcus aureus
atgaaatcaaaatcatgtaaatattttattttagggaaacgtgctgaattcacagcacgtttaaattttaattctgattggtattctatttctttttccgttaaatcaatcaatatttcagttaaagatttctaa

SEQ ID NO: 5710 - protein, 44 aa, Staphylococcus aureus
MKSKSCKYFILGKRAEFTARLNFNSDWYSISFSVKSINISVKDF

SEQ ID NO: 5711 - DNA, 273 bp, Staphylococcus aureus
atgattggatttcctgtcttaattgcaatcatcgctttaaaaatagttgtcgacgtaggatttgttgttggcgtaacaccacaaataacaccaattggttccgctacatacgttaatcctttttctttatcttcaccaataatccctactgtcttattgtcttttattgaattccatatatattcagaagcgtataaatttttaatcgctttatcttcgtatatacctcttccagtttcttcatgtgctaattttgctagcaccatatgttga

SEQ ID NO: 5712 - protein, 90 aa, Staphylococcus aureus
MIGFPVLIAIIALKIVVDVGFVVGVTPQITPIGSATYVNPFSLSSPIIPTVLLSFIEFHIYSEAYKFLIALSSYIPLPVSSCANFASTIC

SEQ ID NO: 5713 - DNA, 726 bp, Staphylococcus aureus
atgagttacttcactgattttgtaaggggatttttagatttaggtgcaactgttattttaccggttgtcatattcttgcttggcctattctttaggcagaaaattggagcggcatttaggtctggtttaacaataggtgtggcttttgtagggattttcttagtcatcgatttattagttaaaaatttagggccagcagcacaagcgatggttaaaaatttaggcgtcagtctgaatgtgattgatgtaggttggccagcaacatcatctatcgcttgggcatcatctgtcgcagcatttattattccactcggaatcatagttaacgttgtattgctagtaactaaagtgacaaagacgatgaatgtagatatttggaatttttggcattatacgtttacagcagcaatggtttatgccgtatcaggcagtatttggcaagcgttattagcagcagttattttccaagttatctgtttgaaagtagcagattggacagcaccgatgatgagtgagttctttgatttaccaggtgtatcgattgctacaggaagtacaatttcttatgcaccaggtatttacttagttaaattgttacaaaaagtacccggtctgaataagttagatgctgatcctgaaacaattcaaaaacgttttggcgcatttggagaatctatctttgtcggcttaattttaggtttaggtattggtgtgttagcaggttaa

SEQ ID NO: 5714 - protein, 241 aa, Staphylococcus aureus
MSYFTDFVRGFLDLGATVILPVVIFLLGLFFRQKIGAAFRSGLTIGVAFVGIFLVIDLLVKNLGPAAQAMVKNLGVSLNVIDVGWPATSSIAWASSVAAFIIPLGIIVNVVLLVTKVTKTMNVDIWNFWHYTFTAAMVYAVSGSIWQALLAAVIFQVICLKVADWTAPMMSEFFDLPGVSIATGSTISYAPGIYLVKLLQKVPGLNKLDADPETIQKRFGAFGESIFVGLILGLGIGVLAG

SEQ ID NO: 5715 - DNA, 1662 bp, Staphylococcus aureus
atgaatcgtcgacgtacatggaaagcacgttggcaattatgtattattttcagtttgtttgccttaatgtctaatttaactggtatcgtcatcgatcatcaacatagtttgtcaggaagtgtgtacttccgtttagatgatgatgtatctttagctaacacacgtgtattaacgataggtgtcgcaggattagttggtggcccttttgtaggtctatttgttggcgttatttcaggtattttcagagtgtatatgggtggggcggatgcacaagtttatcttatctcatctatatttatcggtataattgctggttattttggcttacaagctcaaagacgcaagcgttacccgagtattgcgaaaagtgccatgattggaattgttatggaaatgattcaaatgttgagcattttaacattttcccacgacaaagcatatgcggttgacctcatatcattaattgcactaccaatgattattgttaatagcgttggtacggcgatttttatgtctattatcatttcaacattaaagcaagaagagcaaatgaaggctgttcaaacacatgacgtactgcaattgatgaaccagacattgccgtattttaaagaaggattgaatagagaatcggcacagcaaattgcgatgattattaaaaatttaatgaaagtatctgccgtagcaattacaagcaaaaatgaaatcttatcgcatgtaggtgcaggtagtgatcatcacataccaacaaatgaaatattaacaagtctgtctaaagatgtattgaaatcaggaaagttgaaagaagtgcatactaaagaagagattggttgtagtcatccgaattgcccgcttagagcagctatcgtgataccacttgagatgcatggttctatcgtcggtacattgaagatgtattttacaaaccctaatgatttaacttttgtggaacgtcaacttgcagaaggattggcaaatatttttagtagccaaattgaacttggtgaagccgaaacgcaaagtaagttattgaaagatgctgagattaagtcattacaggcacaagtgagtccacattttttcttcaattcaattaacacgatttcagctttagttagaataaatagcgaaaaggcacgagagttactattagaattgagttattttttcagagcgaatttacaaggctcaaagcaacatacgattactttagataaagagttaagtcaagtgcgtgcatacttatcactcgaacaagcacgttatccaggaagatttaatatcaatattaatgttgaagacaaatatcgcgatgtgcttgtaccaccatttttaattcaaattttagttgaaaatgccatcaaacatgcgtttacgaatcgaaagcaaggtaacgatattgacgtgtcagtgattaaagaaactgcaacacatgtacgtattattgtacaagataatggtcagggtatttctaaagataaaatgcatttgttgggagaaacatctgtagaatcagaatctggaactggtagtgctttagaaaatttaaacttacgcctaaaaggattatttggaaaatccgcagcattacaatttgaatcgacatcgagcggtaccactttttggtgtgtacttccttatgaaagacaagaggaggaataa

SEQ ID NO: 5716 - protein, 553 aa, Staphylococcus aureus
MNRRRTWKARWQLCIIFSLFALMSNLTGIVIDHQHSLSGSVYFRLDDDVSLANTRVLTIGVAGLVGGPFVGLFVGVISGIFRVYMGGADAQVYLISSIFIGIIAGYFGLQAQRRKRYPSIAKSAMIGIVMEMIQMLSILTFSHDKAYAVDLISLIALPMIIVNSVGTAIFMSIIISTLKQEEQMKAVQTHDVLQLMNQTLPYFKEGLNRESAQQIAMIIKNLMKVSAVAITSKNEILSHVGAGSDHHIPTNEILTSLSKDVLKSGKLKEVHTKEEIGCSHPNCPLRAAIVIPLEMHGSIVGTLKMYFTNPNDLTFVERQLAEGLANIFSSQIELGEAETQSKLLKDAEIKSLQAQVSPHFFFNSINTISALVRINSEKARELLLELSYFFRANLQGSKQHTITLDKELSQVRAYLSLEQARYPGRFNININVEDKYRDVLVPPFLIQILVENAIKHAFTNRKQGNDIDVSVIKETATHVRIIVQDNGQGISKDKMHLLGETSVESESGTGSALENLNLRLKGLFGKSAALQFESTSSGTTFWCVLPYERQEEE

SEQ ID NO: 5717 - DNA, 183 bp, Staphylococcus aureus
atgccgacacaatgtttggctattgaagattctgtacatggtgcaacagccgcgattgcagctggattagatgttattgttaatacgaataaaatgacaagcgcacaggacttttctaatgtagattatgtagcaaaagatattgattacgatcaaattgtagcgcgtttctttacgaaatag

SEQ ID NO: 5718 - protein, 60 aa, Staphylococcus aureus
MPTQCLAIEDSVHGATAAIAAGLDVIVNTNKMTSAQDFSNVDYVAKDIDYDQIVARFFTK

SEQ ID NO: 5719 - DNA, 126 bp, Staphylococcus aureus
atgaaaaaagtaatggggatattattagcaagtacacttatcttaggtgcttgtggacatcatcaagatagtgcaaaaaagagagcactagtcacaaaaagaaagaaaatgacaatgaagaattaa

SEQ ID NO: 5720 - protein, 41 aa, Staphylococcus aureus
MKKVMGILLASTLILGACGHHQDSAKKRALVTKRKKMTMKN

SEQ ID NO: 5721 - DNA, 171 bp, Staphylococcus aureus
atgactaacacattagacacgctcatcgcattatctaaagagtacacaagattattagaagagcgaaagcaaaataagtataacgttaaagaaacacgattaaaacgcacaggtttagttttaagacaaacaatgattgatttggaaaaaggtggaatggaaaatgactaa

SEQ ID NO: 5722 - protein, 56 aa, Staphylococcus aureus
MTNTLDTLIALSKEYTRLLEERKQNKYNVKETRLKRTGLVLRQTMIDLEKGGMEND

SEQ ID NO: 5723 - DNA, 2745 bp, Staphylococcus aureus
atgacgtctaaacttcttagacaactctccttattcatatcttatatccttattctctcactactcatatttttcacagcgcgagcgtcactgattgctggtgcaattcttgcaattgtatttataatattttctataatattacgatttattatgaaaataattaaattacagaataatattaaatattatagaatattaacttatgaaggagatttccctaaatctgataaaatttttaaattattaaaaaatattcattcaactagaagaaatatttttgaaagatttttttatggagatccgtggtttacttttttaatctatagagaaaatagaccaggaaaaagtaaggatagtaaattaggtttttatttagcaggggataaagagttaatggtttcagttagaaaacattttagcaatgtttatccaaacatagaatttcatgaagcagatgaaagccatttagattttcctgttaaaagatcatattttggttatgctaagttaaaacataattctttaaaacagggttatcctatagaaaactttcaacatgataatttaactaagatagttagcattatggaacctgatacatggttgcaatttagatttagaagaaattacggttttaagttaagaaaagctataaaaaagactgatgaagatattagagagcaaaagttcaaggatcgggataattacgaaaaggagatttggaaagaaaccaacaaacgttttacgtatagtgatgttgcttttgatacaacaatcagtatggcgactaactcacatgacggccagcatttattaaaagatatgtatacaattcttaatgaatgtaagtctgtaaatgaacttgtatataggccttcaatgtttaaggtagtggattggtacaatttatggaaacgtggtaaaagtgtcttaacttcaagagaattagctaattttgtgcatatgccagttattaatcgagataatagcttgattgataaaattaagccatttacaccatatattgaattaggtaatacgcctttaagtgaagacactttagcaacgggtcttaaattgggaactttagatcaccctataattaaagatagggaagtatttattttacctgaaatactaagaaaacaattttgtgttacaggcgcaacgggttcaggtaagacgaaccttttaaattgtattttgaataacttcaataaaagttttgttgaaagtttagaagcgacgccagggttttcattagtagatccttcaggaagtgcaataaaattactacttaatagattgcgtgtttttgaaacttttgaaggtaacgaggtagattgggataaagtacatttcatcaaagttaaagatagtgaatacccgttagcatgtaatttattggctaaattagatggggaaaattctgaagaaatgatagataatgttttcagaattatcagcgaaaactttgatacagcaacccaagctgaaagactattgcgatatacaattaaagcgttaattcatgatccgaaagaaactcatacgattatgtctgttataagaatgttatacaaaaatgatgatatttttagaaaacgtatcatagaccgtattagaccatatacagaaatgtatgaagtggttaatttctttgataatgaagcttctgatttaattgaaagtccatcaggtcaagctgttttgaataggttagatgtatttaaatcgaatagtacattaagaaacctattttgtcagaaagagtttaacctaccaatccgcaagtggatggacgaaggacatatagtattttatgatcttgtcggaatgagtgaacaggaaattaaaatattttgttcatacattgcttatatgtattatcgtgttgcagatcaaagacccgcagacacttctttacttcatttaacagttgttgatgaagcgcataaagtacaagcttctatcttccctaaaatcatcagtgaacaaagaaaattcggccattcattaggaattgctacacaaaatttagatgatttaaattcagaattaagatcagcattagttaataatcaatctaatttctttgtttgtagacagggggaaagtggttcagcattagcaactaaaatcttcaaaagtagcgacaaaaaagaacaacattacactgaaagttattttaaacagttgcccgacaatgtttgtgcattgagaacacaagatgttattgaaggcgaaacagttaatgttaaaacgcaagttaaagtgaaacctatcgaccgtgttatggaagatgggaaagttgctgattataaagatcggtatgaacctaaaattgcagacgaatggactatgaaaaaggctgtagagttaagcgctaacaatggtatgtattataaagagatacctaaaatggtaagagcattttttgaagatgaagaatacacttatcaaggtaagcaacaagaagaatttaaagcagatgttattaaacgtaaaccgattgttccagaagaaattaaacgtaagccaaaagaacaaaaacaagaaattaaacctaaaacaaaaaaagttaaattaaataaatctaaagtcgtctttaaaacatcaaaagacgaagtcaatcaagaggaacgaactaaacccaatgaaaacagtcaagtttcacaggaaacagagaaatcaaaaaatgtaggttcctttttaagtggcttcacagataagggggactga

SEQ ID NO: 5724 - protein, 914 aa, Staphylococcus aureus
MTSKLLRQLSLFISYILILSLLIFFTARASLIAGAILAIVFIIFSIILRFIMKIIKLQNNIKYYRILTYEGDFPKSDKIFKLLKNIHSTRRNIFERFFYGDPWFTFLIYRENRPGKSKDSKLGFYLAGDKELMVSVRKHFSNVYPNIEFHEADESHLDFPVKRSYFGYAKLKHNSLKQGYPIENFQHDNLTKIVSIMEPDTWLQFRFRRNYGFKLRKAIKKTDEDIREQKFKDRDNYEKEIWKETNKRFTYSDVAFDTTISMATNSHDGQHLLKDMYTILNECKSVNELVYRPSMFKVVDWYNLWKRGKSVLTSRELANFVHMPVINRDNSLIDKIKPFTPYIELGNTPLSEDTLATGLKLGTLDHPIIKDREVFILPEILRKQFCVTGATGSGKTNLLNCILNNFNKSFVESLEATPGFSLVDPSGSAIKLLLNRLRVFETFEGNEVDWDKVHFIKVKDSEYPLACNLLAKLDGENSEEMIDNVFRIISENFDTATQAERLLRYTIKALIHDPKETHTIMSVIRMLYKNDDIFRKRIIDRIRPYTEMYEVVNFFDNEASDLIESPSGQAVLNRLDVFKSNSTLRNLFCQKEFNLPIRKWMDEGHIVFYDLVGMSEQEIKIFCSYIAYMYYRVADQRPADTSLLHLTVVDEAHKVQASIFPKIISEQRKFGHSLGIATQNLDDLNSELRSALVNNQSNFFVCRQGESGSALATKIFKSSDKKEQHYTESYFKQLPDNVCALRTQDVIEGETVNVKTQVKVKPIDRVMEDGKVADYKDRYEPKIADEWTMKKAVELSANNGMYYKEIPKMVRAFFEDEEYTYQGKQQEEFKADVIKRKPIVPEEIKRKPKEQKQEIKPKTKKVKLNKSKVVFKTSKDEVNQEERTKPNENSQVSQETEKSKNVGSFLSGFTDKGD

SEQ ID NO: 5725 - DNA, 861 bp, Staphylococcus aureus
atgtcatatacaacattaaatgaaaaagacttcaaattatttagcttcttagaagctcatatatatttgactatcgagcaaatacgcaccgcaatatatttaaatgatgatggttcaatgaaatcagaaaaatcggtttggaatagattaactaaattagaagaagacggctatattaccaaatttaaagcgcaagcaacattacaagctaagcgcccaaactcaatatattgtttaactaaaacaggtagtatgtttttagaaagtatgcaaggttatacgcatttcaaatcagtatatgagaaaaagcttccaatgtggtatatgcaccagttagccgttaatgatgttgtattatcatatgaaaaacataaaatacccgctgttgatttactagaatatgcaaacgagcaaagaactacttttcaatataatgacggccgtgaagatgttattcgtcctgatggtgcaattttattagaaagacaagatggttacgttataggcattatgttagaagttgaaagatctaaaaaagctagaaaatttacttacgataaattagtgagatataaagacttttttaatcagtcaaataacactatgaaaagatttcatattcatgcaggttttgaagaatttgtagatgaatggcgtttgttatttgtgagtaatgaagatgaaaattatcgtaaattgaaacgtgatttcaaaacggtagattttgaagacgcttttaaaggtcaaaatagttttgatgtaatgatagcaaaacttgatgacataataactaatccttatggtgcaatatataattatttcaaaccaggtttagactttgatgaatttagaacactttaa

SEQ ID NO: 5726 - protein, 286 aa, Staphylococcus aureus
MSYTTLNEKDFKLFSFLEAHIYLTIEQIRTAIYLNDDGSMKSEKSVWNRLTKLEEDGYITKFKAQATLQAKRPNSIYCLTKTGSMFLESMQGYTHFKSVYEKKLPMWYMHQLAVNDVVLSYEKHKIPAVDLLEYANEQRTTFQYNDGREDVIRPDGAILLERQDGYVIGIMLEVERSKKARKFTYDKLVRYKDFFNQSNNTMKRFHIHAGFEEFVDEWRLLFVSNEDENYRKLKRDFKTVDFEDAFKGQNSFDVMIAKLDDIITNPYGAIYNYFKPGLDFDEFRTL

SEQ ID NO: 5727 - DNA, 1176 bp, Staphylococcus aureus
atgagaaagtggggcaagcagtccgataaaaaggttaaaaaacaaaaatcaaagcccgcacaaaatgaagaaacgacagaagattatagaaaaaagaagaagtcagcagatcgtttgtttaaacgtaacaagttaaaaaaggcgttaaaaaacagaggtaaggacgacaaaattttaagtaaagctaaattgaaacgccctaaaggttataacgttgttaaaacggtcataatcatagctttatttttagtagttgttagttggataaatgcaggtaatgctaatagaaaagcaagtgacgcacaaaaacaatatcagaaattagcctcacaaattgatactactaacaaaggcaatccagctacacaagtaggcgcccaggaatacgcgaaagatttcatacaaaaatattacagttatgataaagggcaagaccgcgataaatggttagataatttaagcgattatgtagacagttcaacattagatgataatagctttaagcctgaaaatataggtggcagtatttcagttaaggacgttaaaatcaatgatgttgaaagtgcagataaaaaccaagcgaaaatatattttacagttacgctagataaaaagacagttgaagaaaaaactgttaagaagaaagttaaaggcaaaaaaggcaagaaggataaagaagaaacaaaaacagtacaagaagataaacacgaagatgttaaattcaacagatacattaaagtatatggcgacgataaaggttataagttaatcactttacctttaccatatgaacaaaaatcaaatgcagatgttcagatgaggctagatactgataatggtagagatgttacaacaaattatcctgatgttaaagattacattacaagctttatgaaagtttacgcttcagatgatagagatacagcgcaaacatatttctataataaatctgatacacaattattgaataacaatgttgaaattaaaaacgttgaagaagtgaaagtgtatcaagaaaacaaacaagatgaacttaaagcgattacaacggtacaaatggaagaaaaagatagtggcttaacaagtcgaaacaaatttgaaattaagcttaaaaagcttgatgacaataagtataatgtaattaaagtaagtgaacctcaatacactaaaaaataa

SEQ ID NO: 5728 - protein, 391 aa, Staphylococcus aureus
MRKWGKQSDKKVKKQKSKPAQNEETTEDYRKKKKSADRLFKRNKLKKALKNRGKDDKILSKAKLKRPKGYNVVKTVIIIALFLVVVSWINAGNANRKASDAQKQYQKLASQIDTTNKGNPATQVGAQEYAKDFIQKYYSYDKGQDRDKWLDNLSDYVDSSTLDDNSFKPENIGGSISVKDVKINDVESADKNQAKIYFTVTLDKKTVEEKTVKKKVKGKKGKKDKEETKTVQEDKHEDVKFNRYIKVYGDDKGYKLITLPLPYEQKSNADVQMRLDTDNGRDVTTNYPDVKDYITSFMKVYASDDRDTAQTYFYNKSDTQLLNNNVEIKNVEEVKVYQENKQDELKAITTVQMEEKDSGLTSRNKFEIKLKKLDDNKYNVIKVSEPQYTKK

SEQ ID NO: 5729 - DNA, 297 bp, Staphylococcus aureus
atgttagatttaatgacgtcaattgcttcaatagactttagttctttcacattaggacaagcaggtggagatttagtaaataacgcgcgtgaaggagaaagaaactttacattagtcttaaacattgtttattgggctatcgctgcgattattattgtggtattagcattatctaagaaattcagaatggcattaggtgcattgattatcttaggtgttatcggcgcgttagttgttagagatccgcaaaatttacaaaacttaggcgaaagtatagcgcaattctttggcttctaa

SEQ ID NO: 5730 - protein, 98 aa, Staphylococcus aureus
MLDLMTSIASIDFSSFTLGQAGGDLVNNAREGERNFTLVLNIVYWAIAAIIIVVLALSKKFRMALGALIILGVIGALVVRDPQNLQNLGESIAQFFGF

SEQ ID NO: 5731 - DNA, 459 bp, Staphylococcus aureus
atgagtaatatgaaaaaaatcattggttactgttcatcacaattagatgaaataccaaacttaatacgtggtttaggcggtggagagcaaggcttttcactgcctttttctttgacagttagtcagataatcgttattttcacgattattttacctggtttatttttcttacctataacaaatggattattagactttttgccgaaatacggtagatatgcaattgtctttttcattcatataggttttcccgctgtatttggttttttcataggtcaaaaaagtatcgaaaatatgaacgttgtgaaatatgcaaaagtatatatggctacaaaatttaatgaaacgtctgattatgtaggacgtgaagaattagataacaagaaatcatataagttgagaaaaaaagttgtagcgcgtaccttttcagatttccgcataaacaaggaggataaataa

SEQ ID NO: 5732 - protein, 152 aa, Staphylococcus aureus
MSNMKKIIGYCSSQLDEIPNLIRGLGGGEQGFSLPFSLTVSQIIVIFTIILPGLFFLPITNGLLDFLPKYGRYAIVFFIHIGFPAVFGFFIGQKSIENMNVVKYAKVYMATKFNETSDYVGREELDNKKSYKLRKKVVARTFSDFRINKEDK

SEQ ID NO: 5733 - DNA, 2586 bp, Staphylococcus aureus
atggctaaaagactagattttgatatagaagcagttgtagaaaacatcatctttactaaagatggccgtatgcaagcatggtttgagtttgaagggtttcacagtaactttgatacagaaaacgaattattaattaaatttagacagttgaaacgtgtatttaaagaggtaaaaaaagaagttcattgtttaattatccccgaacgtcaagacttagatgaaattaaaaatcaacatctttcatacagtagagggcgtttgataccagtattagaacaacatgaagacgctatttttgaccatttaaaaaattcaaatgaattaggttcatcagaaaacaaagttcgttattatatgggctttgaattaggaaagagtacaatggtcaactttactaatgaagatgttacgtggggcgagatatacacagaaacaaaagaaaagttaattaaccttattactaaagcgattactggtaaagacgtattattaacaactaacaaagttaaaacagcatataacaaaatggatcaattaagtaatacgctaaataacttaccgtttacatttagagaaattgaacccgtagaaatggcaaagcttataacatggcctaataatttaaatgtaagagaaccgtttttaaatgataattggtttgaacgtttaacacccgtttacaatggcgatagattaatcgctaaaattagagatcgtggccatgtagaagatttatcaacagtatcatattcaaatcctagcagtagaaaacatcttgtattacaccaaaatgacgcgttaggcaaagaaagagatacttatatttcatttttacaactagcaaaagtaccagttgaaacgcacttccctgatacacgttggcttgaaatacttagaaacttacaatttggcgtaggtgtttcattaaaattaacttatcaaagttcagatagaagattaatgaaacttagatctaaaaaagctaacttagaagaccaagtagaacatttggcagattacggcgatagtgcaagttcaaacgtttatgacggcatagacatagctgatgatttaatcgcaaatattgaaaaaaatagggaagctagtttcttaatgtcagctatattcgtagttacagccgaatctcaaaaggcattaaataggaaattagatgaacttaaagaaacaatgtcaaatcatcagtacattgttcagaatacaagaggtttacaattaagaagtttgcttgaatgtatgccaggaagtagaagatatgtaaaagagtttgtgaaagattgcgatataaacatgatgacaagttcattttttggaaaccgtcacgagttaggcgatccttacggcttttacgtaggtcaaattgctacaaattacggtacgccagtatttcatatgccaggttttgcgtctacaggacaagctaaaaaccaatcattggccatttgtcatacaggaaaaacaggcggtggaaaatcattcggtgcaaaccttttattctatgaatatgcaatatggggcgcaaaagttttaatagtagaccctaaacaagagcgaatgaataagtgtgaatggcataagaaattagatgaattaggtacacaattaaacttcattactttgtcagctaaacctaaagacgcaggtaaacttgatccgttctatatctttacagacgtatcagacgctgtaggtgtatcagaacagatacttcataatttactatcaatttctattagaaatgaagcaactatagatcaagcaacaatgattaacagggcattagaatatgtagcgaatagagatgaacctaaaattaatcaggttacagaagaacttacatctatgagtacaggcgagaaaaaagatattacattaactgaagatgaaaaagaactttgtaagcgtcttgtaaatagaattaatgtatatactacacactcattaagtacgctaatatttggagaaagaattgatgatacagaagttttagatattaatagtcaattaaacgtgttgcaagtagaaaatttagaacttgcagacgctgatatagaccctaaagactattcaaaagcaaatattgtaagtgatagtattttatatgctttaacagcttatcaaagacagtttattaacatgttccctaatgatctaacagttatcggacttgatgaagcctggaaatacttcaaaaactcacaaggacgttcagcctttcaaagtttattccgtgaaggccgttctaaaggggcttcaattcatatcatgacacaaagacttagtgatatacctgaagacatgcagtcacaaatcggacaactatttgcatatttagaaagtaatacagatgaaattaataaacttcagcaattctttagatttgatgatagtacagacttacaagcgattatgcctgaacttgaaacaggcgtatgtgtttataaagacttgaatgatcgcgtcggtattcttgatgtaagagtattacaagagcatttagtagacgcgtttgatacaagtaatcaacttgaaaaacgagaagacacaaaacaagaggtgcaagtataa

SEQ ID NO: 5734 - protein, 861 aa, Staphylococcus aureus
MAKRLDFDIEAVVENIIFTKDGRMQAWFEFEGFHSNFDTENELLIKFRQLKRVFKEVKKEVHCLIIPERQDLDEIKNQHLSYSRGRLIPVLEQHEDAIFDHLKNSNELGSSENKVRYYMGFELGKSTMVNFTNEDVTWGEIYTETKEKLINLITKAITGKDVLLTTNKVKTAYNKMDQLSNTLNNLPFTFREIEPVEMAKLITWPNNLNVREPFLNDNWFERLTPVYNGDRLIAKIRDRGHVEDLSTVSYSNPSSRKHLVLHQNDALGKERDTYISFLQLAKVPVETHFPDTRWLEILRNLQFGVGVSLKLTYQSSDRRLMKLRSKKANLEDQVEHLADYGDSASSNVYDGIDIADDLIANIEKNREASFLMSAIFVVTAESQKALNRKLDELKETMSNHQYIVQNTRGLQLRSLLECMPGSRRYVKEFVKDCDINMMTSSFFGNRHELGDPYGFYVGQIATNYGTPVFHMPGFASTGQAKNQSLAICHTGKTGGGKSFGANLLFYEYAIWGAKVLIVDPKQERMNKCEWHKKLDELGTQLNFITLSAKPKDAGKLDPFYIFTDVSDAVGVSEQILHNLLSISIRNEATIDQATMINRALEYVANRDEPKINQVTEELTSMSTGEKKDITLTEDEKELCKRLVNRINVYTTHSLSTLIFGERIDDTEVLDINSQLNVLQVENLELADADIDPKDYSKANIVSDSILYALTAYQRQFINMFPNDLTVIGLDEAWKYFKNSQGRSAFQSLFREGRSKGASIHIMTQRLSDIPEDMQSQIGQLFAYLESNTDEINKLQQFFRFDDSTDLQAIMPELETGVCVYKDLNDRVGILDVRVLQEHLVDAFDTSNQLEKREDTKQEVQV

SEQ ID NO: 5735 - DNA, 999 bp, Staphylococcus aureus
atgaaaaatttaagaaatagaaactttttaactttgttagacttcacacaaaaagaaatggaatttttacttaatttatctgaagatcttaaacgcgcaaaatatgcaggaatagaacaacaaaaaatgaaaggtaaaaatatcgctctactttttgaaaaagattcaacacgcactcgatgtgcatttgaaacagcggcttatgatcaaggtgcacatgtaacataccttgggccaacaggttctcaaatgggtaaaaaagagtctaccaaagatactgctcgtgttttaggtggaatgtatgatggcatagaatatcgtggattctcacaaagagtagttgaggatttggcaaaatattctggcgttcccgtatggaatggtttaacagatgaagatcatcctacacaagtacttgctgattttttaacagctaaagaagtattgaaaaaaccatataatgaaattaacttcacatatgttggagatggacgtaataacgttgcaaatgccttaatgcaaggagcagcaatcatgggcatgactttccatcttgtatgtcctaaagaactaaatccaactgatgaattattaaatcgttgtaatgatatagctgacaaaaacggtggtgaaatccttataactgacgatattgatgaaggtgtcaaaggatctgatgtaatttacacagatgtttgggtatctatgggtgaacctgatgaagtttgggaaaaacgtatcaaattattagaaccataccgtgtaactaaagaattaatgaaaaaaacaggtaatccacatacaatttttgaacattgcttaccatcattccatgatactgaaacaataatcggtaaacaaattcaagaaaaatatggtctaactgaaatggaagtaacaaatgaagtatttgaaagtgaacaatcagttgttttccaagaagcagaaaatagagcacatacaataaaagcagtcatggtagcaacattaggagagtaa

SEQ ID NO: 5736 - protein, 332 aa, Staphylococcus aureus
MKNLRNRNFLTLLDFTQKEMEFLLNLSEDLKRAKYAGIEQQKMKGKNIALLFEKDSTRTRCAFETAAYDQGAHVTYLGPTGSQMGKKESTKDTARVLGGMYDGIEYRGFSQRVVEDLAKYSGVPVWNGLTDEDHPTQVLADFLTAKEVLKKPYNEINFTYVGDGRNNVANALMQGAAIMGMTFHLVCPKELNPTDELLNRCNDIADKNGGEILITDDIDEGVKGSDVIYTDVWVSMGEPDEVWEKRIKLLEPYRVTKELMKKTGNPHTIFEHCLPSFHDTETIIGKQIQEKYGLTEMEVTNEVFESEQSVVFQEAENRAHTIKAVMVATLGE

SEQ ID NO: 5737 - DNA, 561 bp, Staphylococcus aureus
ttgaaagataaaatactaggtgtcgcaaaggaattatttataaaaaatggatataatgccactactactggagaaattgttaaattatcagaaagtagtaaagggaatctttattatcactttaaaacaaaagaaaatctatttttagaaattttaaatatagaagaatctaaatggcaagaacagtggaaaaaggaacaaatcaaatgtaaaactaatagagaaaaattttatttatataatgaactatctttaacaaccgaatactattatccacttcaaaacgcaataattgaattttgcactgaatattataaaactaatagcattaatgaaaaaatgaataaattagaaaacaaatatatagatgcttatcatgtaatttttaaggagggtaatttaaatggcgaatggtgtattaatgatgttaatgctgttagtaaaatagcagcaaacgctgttaatggaattgttacctttacacatgaacaaaatattaatgaaagaattaaacttatgaacaagttctctcaaatttttttaaatggacttagtaaataa

SEQ ID NO: 5738 - protein, 186 aa, Staphylococcus aureus
MKDKILGVAKELFIKNGYNATTTGEIVKLSESSKGNLYYHFKTKENLFLEILNIEESKWQEQWKKEQIKCKTNREKFYLYNELSLTTEYYYPLQNAIIEFCTEYYKTNSINEKMNKLENKYIDAYHVIFKEGNLNGEWCINDVNAVSKIAANAVNGIVTFTHEQNINERIKLMNKFSQIFLNGLSK

SEQ ID NO: 5739 - DNA, 1545 bp, Staphylococcus aureus
atgatttcattttttacaaaaactactgatatgatgacatcaaaaaaaagatggactgcactagtagtattagctgttagtttgtttgttgttacaatggatatgacaatattaattatggctttaccggaattagtaagagagttagagccttctggtacccaacagttatggatagttgatatatactctcttgttttagctggctttataattccattgagtgcctttgctgataaatggggaagaaaaaaagcattattaactggatttgctttatttggcctcgtttcattagctatatttttcgcagaaagtgcagagttcgtaatagctattcgatttttacttggtattgcaggtgctttaataatgccaactactctttcaatgataagagtaatttttgaaaaccctaaagaaagggccactgcattagctgtatggtcaatcgtttcatcgataggtgctgtttttggaccaattatcggaggagctttacttgatcaattttcatggcactcggcatttttaattaatgtaccgtttacgataatagcagttgtagcaggtttatttttattaccagagtctaagttatcaaaagaaaagtctcactcgtgggatattccttctacaattttatcaattgcaggcatgattggactggtatggagtatcaaagaattttcaaaagaaggactagcagatattattccatgggttgtaatagtattagcaattaccatgatagtgatatttgttaaacgtaatttatcaagttctgatccaatgttagacgtaagactttttaaaaagagatcattttcagctggtacaattgctgcatttatgacaatgtttgcaatgacatctgttttgttattagcttcacaatggttacaggttgtggaagaactttctccttttaaagctggcttatacctattacctatggcaataggagatatggtgtttgcaccaattgcacccggattagcggcgcgatttggaccgaaaatagtgttaccttccggaattggaattgcagccattggcatgtttattatgtatttctttggtcatccattatcatattctacaatggctttagcattaattttagttggagctggtacggcttcactagcagttgcatctgctctaataatgttagaaacacctacatcaaaagcaggtaatgcagctgctgttgaagagtctatgtatgaccttggaaatgtttttggtgtagcagtacttggtagcctatcttctatgctttatcgtgtatttttagatatttcatctttttcatcaaaaggtatagttggagatttagctcatgtagctgaagaatctgtagtgggcgctgtcgaagtagctaaagctacggggataaaacagcttgcaaacgaggctgtaacatcatttaatgatgcttttgtagcaactgctttagtaggtgggattatcatgattatcatttcaatagttgtctatttgttaattcccaaatcacttgatataactaaacaaaaatag

SEQ ID NO: 5740 - protein, 514 aa, Staphylococcus aureus
MISFFTKTTDMMTSKKRWTALVVLAVSLFVVTMDMTILIMALPELVRELEPSGTQQLWIVDIYSLVLAGFIIPLSAFADKWGRKKALLTGFALFGLVSLAIFFAESAEFVIAIRFLLGIAGALIMPTTLSMIRVIFENPKERATALAVWSIVSSIGAVFGPIIGGALLDQFSWHSAFLINVPFTIIAVVAGLFLLPESKLSKEKSHSWDIPSTILSIAGMIGLVWSIKEFSKEGLADIIPWVVIVLAITMIVIFVKRNLSSSDPMLDVRLFKKRSFSAGTIAAFMTMFAMTSVLLLASQWLQVVEELSPFKAGLYLLPMAIGDMVFAPIAPGLAARFGPKIVLPSGIGIAAIGMFIMYFFGHPLSYSTMALALILVGAGTASLAVASALIMLETPTSKAGNAAAVEESMYDLGNVFGVAVLGSLSSMLYRVFLDISSFSSKGIVGDLAHVAEESVVGAVEVAKATGIKQLANEAVTSFNDAFVATALVGGIIMIIISIVVYLLIPKSLDITKQK

SEQ ID NO: 5741 - DNA, 561 bp, Staphylococcus aureus
atgaatagagcagatatttttaaaatatttgatgtagaacttaatataactatatttttaggagcactagtagcaactttcatctattttataagttacatgaacaatgtaaatgaattaattacattatgcttaacattagcttttcctgcatatttattaaaaattagcagatcgttcgaggttattttattagaggaaaaaataaaaaatagtaaaatcaaaatctgtgacaaagatagaattgaacgagagatactggtgaaaaagaacctaatagatgaactattgtttcctaatagagttattaaaaaatatacactgacaattttaatttacagtataggtattattattcttttactactttgtaatatgttaagttatggaattggtgaaaatgtcaattttatctggagattactagcttgttatgtaacgagtgtcacagtgattatagttgccttgattataatgataatgatatttgatcttataattggattactattaaattttcaaatatttttaaaaaataaaaagtatgatgactttttataa

SEQ ID NO: 5742 - protein, 186 aa, Staphylococcus aureus
MNRADIFKIFDVELNITIFLGALVATFIYFISYMNNVNELITLCLTLAFPAYLLKISRSFEVILLEEKIKNSKIKICDKDRIEREILVKKNLIDELLFPNRVIKKYTLTILIYSIGIIILLLLCNMLSYGIGENVNFIWRLLACYVTSVTVIIVALIIMIMIFDLIIGLLLNFQIFLKNKKYDDFL

SEQ ID NO: 5743 - DNA, 381 bp, Staphylococcus aureus
atgattaatattactactttgattagagatacgattgttaaggagagcgttacagatgaagcaaatgtatttaactatacaatagatgaccattttcacgaaaaaactgacaaacctattgttcggatatacccattaccatttaaccctgacgcatacgctgatgataatgaattttcaagagaatatcattaccaaattgatgtttggtgctctcaagatgaaccgaatgaacaagcagaaagaattgtcgattcgctcaaagcaatgaattttcaatgttattacagagaaccgttatacgaaagtgacgtcatgtcattcagacatattataagagcaaaaggctcgattttatcaatgaaattggaggaaaattaa

SEQ ID NO: 5744 - protein, 126 aa, Staphylococcus aureus
MINITTLIRDTIVKESVTDEANVFNYTIDDHFHEKTDKPIVRIYPLPFNPDAYADDNEFSREYHYQIDVWCSQDEPNEQAERIVDSLKAMNFQCYYREPLYESDVMSFRHIIRAKGSILSMKLEEN

SEQ ID NO: 5745 - DNA, 177 bp, Staphylococcus aureus
gtgctttgtgaatctagacaaatttataaaaatcctaaatatcgagttattagatataataatgaatatttcatggtcgatttagtaagtacttggattacttattttttccctatgattaattggttttgcccaaaaaatacgcaaaaattagcgaaaatgaattttaaaggttaa

SEQ ID NO: 5746 - protein, 58 aa, Staphylococcus aureus
MLCESRQIYKNPKYRVIRYNNEYFMVDLVSTWITYFFPMINWFCPKNTQKLAKMNFKG

SEQ ID NO: 5747 - DNA, 351 bp, Staphylococcus aureus
atgaaaaccatcactcaagaactcaaacaatatataacccacctattccaactatctaataacgaagcttgggaatgtgaagcgctggaggaagcagcagaaaatattctaccggaacgttttattaatgattctccactggtacatctcacactcgagacttatacctactataatgatgaactacatgagctaagtatctatccatttctaatgtatgccaataaccaactcatcagtgtcggatacttagaccattttgacatggactttctgtaccttacagatactcaaaatatcattattgatgaacgtcatttactaaaacaaggaggtcaggaccatgaataa

SEQ ID NO: 5748 - protein, 116 aa, Staphylococcus aureus
MKTITQELKQYITHLFQLSNNEAWECEALEEAAENILPERFINDSPLVHLTLETYTYYNDELHELSIYPFLMYANNQLISVGYLDHFDMDFLYLTDTQNIIIDERHLLKQGGQDHE

SEQ ID NO: 5749 - DNA, 1155 bp, Staphylococcus aureus
atgttaaagcataaaataataaatttaatacaagaaaagagagaagggagttactgggattttaaagcagaatatcataaagataaagcagaattattacatgatataatttgtttatcaaataacttgttgaatcaagaagcttatttaattttaggagtcgcagataacggtcatattctgggggttgcaggtgattcaaatcgaaaaaaccaagaagaattaatatcatttattactggaaaaaaatttgctgcgggtaggcaccccaagatttcattaatgacatttgaatatgaagaaaaggaaatcgatgtcattataataaatcctaaaggatatgtaccatactatctggagaaagcagaaaccgatcaaaaaagtaaaaaaaacaaaacagtcaatgcaggtagcatttatacaagagttgaagataaaaataccccaatagattctactgcaagtccattagatacagaaatattatggaaaatgcattttggtttatatcctactcctataaagaggttacagaattatttactaactcctgagaaatggatgcagaactcaacaggttattttcatagtgaatcgccagagtatatagtatacaaaaatgaggacattgaagaaaaagaaaattattttaatttagtaagtccattttatgcgtataatcaaatcaatagtaacactttatactcatattacgaatttaaatatcatagtacagttttatatggttgccggtgtatctctttagattcaggtatctacacaacaccagtacctgaactaggtgagataaattttaatatgcatagagatgatactatttattatcgttatttcattgaagagacgatgctttataatattcatctttttatgtataagggtgattcgatggaagagaaatttgcaatggataaatttttagaatgtgttttggtttataaaagtgatgtagaaaaggaactttttgaaaattatatattagataattgggataaagttaatcagtcaattaatgaaaataataaacgtgtatttggaactgaacatttgtcacaacttgaaaaagaagatatcactaaaaaagtaaaaacagttaaagttttaaaagatgaacttgagaactttagaacttga

SEQ ID NO: 5750 - protein, 384 aa, Staphylococcus aureus
MLKHKIINLIQEKREGSYWDFKAEYHKDKAELLHDIICLSNNLLNQEAYLILGVADNGHILGVAGDSNRKNQEELISFITGKKFAAGRHPKISLMTFEYEEKEIDVIIINPKGYVPYYLEKAETDQKSKKNKTVNAGSIYTRVEDKNTPIDSTASPLDTEILWKMHFGLYPTPIKRLQNYLLTPEKWMQNSTGYFHSESPEYIVYKNEDIEEKENYFNLVSPFYAYNQINSNTLYSYYEFKYHSTVLYGCRCISLDSGIYTTPVPELGEINFNMHRDDTIYYRYFIEETMLYNIHLFMYKGDSMEEKFAMDKFLECVLVYKSDVEKELFENYILDNWDKVNQSINENNKRVFGTEHLSQLEKEDITKKVKTVKVLKDELENFRT

SEQ ID NO: 5751 - DNA, 168 bp, Staphylococcus aureus
atgctagaatctagagagcaattatcagtcgaagaatacgaaacattctttaacagatttgataatcaagaatttgatttcgaacgtgaattgacacaagatccatattcaaaagtatacttatacagtatagaagaccatatcagaacatataagatagagaaataa

SEQ ID NO: 5752 - protein, 55 aa, Staphylococcus aureus
MLESREQLSVEEYETFFNRFDNQEFDFERELTQDPYSKVYLYSIEDHIRTYKIEK

SEQ ID NO: 5753 - DNA, 333 bp, Staphylococcus aureus
atgggtaaaatttattatgaaaactttaatgaagcggttattatgctaatatgtgtagcactatgggcattgattggaattttgtttacttatggtaatttgatatttacagataccgattggagtataacaaaacagactgtagttcactttatattgatgataatcctattcttcccactcgctattctagcaggttggttccatctgaactttgagaatattattagtttcatcataatatttattgtagtgtatatcacgatgtggtttgggacatatcaaagaaataaaaagataattcatgaggcaaataataaattaggtcattaa

SEQ ID NO: 5754 - protein, 110 aa, Staphylococcus aureus
MGKIYYENFNEAVIMLICVALWALIGILFTYGNLIFTDTDWSITKQTVVHFILMIILFFPLAILAGWFHLNFENIISFIIIFIVVYITMWFGTYQRNKKIIHEANNKLGH

SEQ ID NO: 5755 - DNA, 666 bp, Staphylococcus aureus
atgaaaaaaattattaatattctattaattgcaatactatccatcacatttattggtttagcactatttgtagtaaattttgctaaagatacgttcatcaatgacaacacaaaagctgatactgtaagtaaaaaacaagataaagataagaaagatgagaataaatcaccaaaatctgataaccaaaaagatcttgaatctaatgattcaaatcaagacactactcaacacactacaagtaacagccaatctctagaaacagagtctcaagatttaaacaacgataaccaatcatcagaaatgaatcattcagatagctctaaaaataataatgataatcaaacggcttctgacgaagattatattgatgtaatgcaatatgataaaaatggtgatggcttcgtatctactagtgaattaactccagaagctcaaaaactagtagatgaaggtaaattgcaaccaacatcagatgctatggctaaagaatggagtactgcaaaaaaacaaagagaacaatctggaatgactcaagaggaattagataatttatcagaagatgaacaagcattcataggttataatccaaacaatccacgcggagatgtaggtagtcctaaacctgtatattcagatgatgataccgactctagtgaagaagattaa

SEQ ID NO: 5756 - protein, 221 aa, Staphylococcus aureus
MKKIINILLIAILSITFIGLALFVVNFAKDTFINDNTKADTVSKKQDKDKKDENKSPKSDNQKDLESNDSNQDTTQHTTSNSQSLETESQDLNNDNQSSEMNHSDSSKNNNDNQTASDEDYIDVMQYDKNGDGFVSTSELTPEAQKLVDEGKLQPTSDAMAKEWSTAKKQREQSGMTQEELDNLSEDEQAFIGYNPNNPRGDVGSPKPVYSDDDTDSSEED

SEQ ID NO: 5757 - DNA, 291 bp, Staphylococcus aureus
atgacttataaaagtcaagaatttataaatttaaaaaatacagatttagctattgcaaataatttaccgaaaggcactgaatttacaattggtgatttaactaaaaaatcaggccttaactgttctagaaatgttcaacgcgaggtaggacgttggttcgcttatttcgtaaaacatacacctagcattccttttattattattggtaaaaaaaatggtagtttattgtatcaaaaaataggacctaatccactcaatgatagcaacccttcgaaaggaggtgttcgctaa

SEQ ID NO: 5758 - protein, 96 aa, Staphylococcus aureus
MTYKSQEFINLKNTDLAIANNLPKGTEFTIGDLTKKSGLNCSRNVQREVGRWFAYFVKHTPSIPFIIIGKKNGSLLYQKIGPNPLNDSNPSKGGVR

SEQ ID NO: 5759 - DNA, 735 bp, Staphylococcus aureus
atgtatgactttttagaatatttacatcactattgtataaaatcgatagaaaattggaaggctgtaccgaacttatcgtgtgaaattgaaagaggaaatattgttgaaagtacagaagctatgataggttatcatgtcattttcaaacaaaataaagttataatttatgataatgatatagcttcaattagtaatataagcggaaattatatagcagcagatttattagttactagatatttagatgcaataggtgaatttataggagtatcggaattagatcaacaaagtcattatgagtggctagtgttttttgagaaaacaagaagaatttttaatggtaaaaatattgtttataagtttttatattacttattcattcatacttatggacaaggaaaccaagatgaaaaaataaaaaaatatatgaaaaatatcatagtgcaaactacattttacggactagataatgctattaatgtaagtttagacgaaagtgatggcaagttgtggtataactttgatactcaagacacaaatattttgtttgaaaaaatagatgaagatgagttacttagaattctagatgaaataagtgatactaataagtatgaatcattatttaatattgtgaccgataaacaaaaagaatttttaaattcaagtattagaccaattttaagtgaagatttagaaggtatgaacaatttggataaagtccgtataattgtgtaa

SEQ ID NO: 5760 - protein, 244 aa, Staphylococcus aureus
MYDFLEYLHHYCIKSIENWKAVPNLSCEIERGNIVESTEAMIGYHVIFKQNKVIIYDNDIASISNISGNYIAADLLVTRYLDAIGEFIGVSELDQQSHYEWLVFFEKTRRIFNGKNIVYKFLYYLFIHTYGQGNQDEKIKKYMKNIIVQTTFYGLDNAINVSLDESDGKLWYNFDTQDTNILFEKIDEDELLRILDEISDTNKYESLFNIVTDKQKEFLNSSIRPILSEDLEGMNNLDKVRIIV

SEQ ID NO: 5761 - DNA, 417 bp, Staphylococcus aureus
atgatgccgaaatttagagcgtgggataaattaggtaaggaaatgcacaaagtaagtgctattgattttagtagcaaaggtgcaagaattattcgtttagctggagtacagtctaacggtaaggaaaatcataaaagatggcattcatctgttgaactcatgcaatctacaggagttaaagatgtgaatggtgtggagatattcgaaggcgatatagtgaaagttaatgtgctagaaggaattggaccgaatgcaagaattgtttttaaaaacggtatgtttggcgttgaagatgacatgcatggatacggttacgacaaagggctttattctctaaacctcatcattaatagacacgaggtagaagttaaaggcaacatatttgaatcatctcatttattggaggtaacagaatga

SEQ ID NO: 5762 - protein, 138 aa, Staphylococcus aureus
MMPKFRAWDKLGKEMHKVSAIDFSSKGARIIRLAGVQSNGKENHKRWHSSVELMQSTGVKDVNGVEIFEGDIVKVNVLEGIGPNARIVFKNGMFGVEDDMHGYGYDKGLYSLNLIINRHEVEVKGNIFESSHLLEVTE

SEQ ID NO: 5763 - DNA, 795 bp, Staphylococcus aureus
atggctaaaatgagaatatcaccggaattgaaaaaactgatcgaaaaataccgctgcgtaaaagatacggaaggaatgtctcctgctaaggtatataagctggtgggagaaaatgaaaacctatatttaaaaatgacggacagccggtataaagggaccacctatgatgtggaacgggaaaaggacatgatgctatggctggaaggaaagctgcctgttccaaaggtcctgcactttgaacggcatgatggctggagcaatctgctcatgagtgaggccgatggcgtcctttgctcggaagagtatgaagatgaacaaagccctgaaaagattatcgagctgtatgcggagtgcatcaggctctttcactccatcgacatatcggattgtccctatacgaatagcttagacagccgcttagccgaattggattacttactgaataacgatctggccgatgtggattgcgaaaactgggaagaagacactccatttaaagatccgcgcgagctgtatgattttttaaagacggaaaagcccgaagaggaacttgtcttttcccacggcgacctgggagacagcaacatctttgtgaaagatggcaaagtaagtggctttattgatcttgggagaagcggcagggcggacaagtggtatgacattgccttctgcgtccggtcgatcagggaggatatcggggaagaacagtatgtcgagctattttttgacttactggggatcaagcctgattgggagaaaataaaatattatattttactggatgaattgttttag

SEQ ID NO: 5764 - protein, 264 aa, Staphylococcus aureus
MAKMRISPELKKLIEKYRCVKDTEGMSPAKVYKLVGENENLYLKMTDSRYKGTTYDVEREKDMMLWLEGKLPVPKVLHFERHDGWSNLLMSEADGVLCSEEYEDEQSPEKIIELYAECIRLFHSIDISDCPYTNSLDSRLAELDYLLNNDLADVDCENWEEDTPFKDPRELYDFLKTEKPEEELVFSHGDLGDSNIFVKDGKVSGFIDLGRSGRADKWYDIAFCVRSIREDIGEEQYVELFFDLLGIKPDWEKIKYYILLDELF

SEQ ID NO: 5765 - DNA, 531 bp, Staphylococcus aureus
gtgattacagaaatgaaagcagggcacctgaaagatatcgataaacccagcgaaccatttgaggtgataggtaagattataccgaggtatgaaaacgagaattggacctttacagaattactctatgaagcgccatatttaaaaagctaccaagacgaagaggatgaagaggatgaggaggcagattgccttgaatatattgacaatactgataagataatatatctttactaccaagacgataaatgcgtcggaaaagttaaactgcgaaaaaattggaaccggtacgcttatatagaagatatcgccgtatgtaaggatttcagggggcaaggcataggcagcgcgcttatcaatatatctatagaatgggcaaagcataaaaacttgcatggactaatgcttgaaacccaggacaataaccttatagcttgtaaattctatcataattgtggtttcaaaatcggctccgtcgatactatgttatacgccaactttgaaaaagctgttttctggtatttaaggttttag

SEQ ID NO: 5766 - protein, 176 aa, Staphylococcus aureus
MITEMKAGHLKDIDKPSEPFEVIGKIIPRYENENWTFTELLYEAPYLKSYQDEEDEEDEEADCLEYIDNTDKIIYLYYQDDKCVGKVKLRKNWNRYAYIEDIAVCKDFRGQGIGSALINISIEWAKHKNLHGLMLETQDNNLIACKFYHNCGFKIGSVDTMLYANFEKAVFWYLRF

SEQ ID NO: 5767 - DNA, 621 bp, Staphylococcus aureus
atgaaattcactgaagtggaagttatcgaacatcttgtaaaggcatataaagaagcaggaaagcctacttatcctcatgaaaatttatatcgaggacgtaatcatagtatttcaggtattggagaagacttgctgggtgcttatttgattagtagattggaaggtgtccaaatatttattgatcagcctttatctatgattgataaatctttaagtacaagatatccggatttattaatttgtgaagataatgaaattaaaaatatactagaagttaaaatggacttaggatatcaaagaaaagattttatagattattgccgaaagaaagaagaatggatttcaaatatcgtaggaaaacagtgtgtattgtctagaaagagagaagacaaaattcctatgaatatagctgatgatattaaatttcatgttgtgatttacagtgaaaacaatggaccgaagcggtttgatgaagaaatcatgcctatcgttaatgaaacatgtccacatattgaagtatatgtcctaacaagcggtcaacaccctaatttagtaaatgttaatcttgaaggtattaatattaataaagatgaatttgaaatattagtaaatgcgttataa

SEQ ID NO: 5768 - protein, 206 aa, Staphylococcus aureus
MKFTEVEVIEHLVKAYKEAGKPTYPHENLYRGRNHSISGIGEDLLGAYLISRLEGVQIFIDQPLSMIDKSLSTRYPDLLICEDNEIKNILEVKMDLGYQRKDFIDYCRKKEEWISNIVGKQCVLSRKREDKIPMNIADDIKFHVVIYSENNGPKRFDEEIMPIVNETCPHIEVYVLTSGQHPNLVNVNLEGININKDEFEILVNAL

SEQ ID NO: 5769 - DNA, 372 bp, Staphylococcus aureus
ttgaaaacgaatattttaaatttagataatgagttagaaaacactgaatatgtcgaaggtaaaccatatgtacagtacggtattaaatatgaaagaaatcaggcattaagaaatgaagctattaaaattcatggaactacatgtaaagtatgtggatttgattttaaagctaagtatggcgatttaggtgagggttttattgaaattcatcatttaaaaccaatgttttcaataaaaagagaaataaaagtaaatccacaaaaagatttagtcccactatgttctaattgccataaaatgattcatagaaatactaaaaaacctttaacgattaaagaattaaccaaaatagttaattataatagcaaataa

SEQ ID NO: 5770 - protein, 123 aa, Staphylococcus aureus
MKTNILNLDNELENTEYVEGKPYVQYGIKYERNQALRNEAIKIHGTTCKVCGFDFKAKYGDLGEGFIEIHHLKPMFSIKREIKVNPQKDLVPLCSNCHKMIHRNTKKPLTIKELTKIVNYNSK

SEQ ID NO: 5771 - DNA, 1005 bp, Staphylococcus aureus
atgatcattgatcctatttgtgacttatcttcatatattcgagttgccgatgaagagagtttaaccattactcatgcagctgaaacacatatacatgcaaattttgtttcaggaattagagatgttgctataaagttaaatgctagtatttatgtatcgggcgaaagtgatgacatgttaggttataaaaatatgcctaaccacactcattttgttcaacataatgatgatatttatgtaggaaatataaaattaaaagtgcttcatacacctggtcacacgccagaaagtataagttttttacttactgacgaaggtgctggagcacaagttccaatgggactattcagtggtgattttatttttgtaggagatatcggtagacctgatttactagaaaaagctgttaaagtagaaggattatctgaaataggcgcaaaacaaatgtttaaatctattgaaagtattaaagacttgccagactacattcaaatttggcctggtcatggcgctggtagtccttgtggtaaatctttaggtgctattccaacatctacgcttggctatgaaaaacaaacgaactgggctttttctgaaaataatgaagctacctttatcgataaactcatttctgaccaacctgcaccaccacatcattttgcacaaatgaaaaaaattaatcaattcggtatgaatttatatcaaccttatacggtttatccagctacaagtacaaacagattaacttttgatctccgcagtaaggaggcttatcatggtggacatattgaaggtacaatcaatattccatatgataaaaatttcatcaatcaaattggctggtatctaaactataatcaagaaattaacttgattggagactatcaccttgtttcaaaagcaacacataacatactttacaacttattggatatgataatgtgtctggatatcagttaccacaagctcaaattcaaacacaatctgttcatagtaaagacataa

SEQ ID NO: 5772 - protein, 334 aa, Staphylococcus aureus
MIIDPICDLSSYIRVADEESLTITHAAETHIHANFVSGIRDVAIKLNASIYVSGESDDMLGYKNMPNHTHFVQHNDDIYVGNIKLKVLHTPGHTPESISFLLTDEGAGAQVPMGLFSGDFIFVGDIGRPDLLEKAVKVEGLSEIGAKQMFKSIESIKDLPDYIQIWPGHGAGSPCGKSLGAIPTSTLGYEKQTNWAFSENNEATFIDKLISDQPAPPHHFAQMKKINQFGMNLYQPYTVYPATSTNRLTFDLRSKEAYHGGHIEGTINIPYDKNFINQIGWYLNYNQEINLIGDYHLVSKATHNILYNLLDMIMCLDISYHKLKFKHNLFIVKT

SEQ ID NO: 5773 - DNA, 1491 bp, Staphylococcus aureus
ttgcatagagaaagtaaatatatagagtataagaaatcacgaaaaggattatctaatgatatttggtctacgtatagtgcttttgcaaatactgaaggtggtactatatatttaggaattgaagaaaaaaagatcgaggacaaaaaagtctttgtttcagttggtgttgaagatccagagaaaatgattgaagatttttggaatgcactatatggaagaagtaaagttagtcaaaatattttatcaaataaagatgttaaaattgttaatattgaaaataaagcgtgcattgaaattcatgtaccagaagcgccttattcgaagaaaccgatatatgtagataataaaaaagatttagtatataaaagagttgatgatgctgatagaattgcgactgaagaagagtataaattcatgattgtaaattctcaagacgatatagatacagaattattagataactatgacatgtctgatttaaatcacgaatctatcgaaaattataggaaacttctattaaaaaatactaatgatgagagatatgcgaatatgagccaactggatttaatgatagatttaggagcatatagaaaagatagaagttcgaaagacaaacagtataaaatgactacagcatgtttattattctttggtaagtataatgcgattagtgatagattcccaggatttcaattagattattttaagaaaacaaattacctagatactgattggaaagatagaatatcaagtggagatttaggtaatgaagatttaaacgtgtatagtttttttgaaaaagtattgataaaattaactgataacattgaggaatcatttagcctaaatgatggtttgactagacaaaattatgcaagagatttaaaagtagcaattcgcgaagcactggttaatacattaatgcatgcgtattatgatactaagcaaagtattaaaatagttaattgtgaagattttatagagttttataatccgggtaatatgagaataaataaagaagattttattcatggagggcattcaaaggacagaaatagtatattatcgacgcttttcagaagagtaggatattcagaaaaagctggatctggaggaccaaggatattcgatgtagttaatagacataagcttaaaacgcctgaaatagaattaacggacatggacactaatgtagtactttggaaacaagatttaatgaaggagtttgaaaaatatcctgagttagacaaaaaagtaataaagtatattattgactatggatcaataagtaagggtgaagccttaaaaatggaaaatatgacagaatatcagtttagaaatattttaaaaaaactaaaagatgataacttgataaaaaaagaaggtgaaggtccggctactaaatatgtgttaatagaatcaaaagaagctgatatattgcgaactaaaaaagtaattaaaagtttagagtctttctttaggaataaataa

SEQ ID NO: 5774 - protein, 496 aa, Staphylococcus aureus
MHRESKYIEYKKSRKGLSNDIWSTYSAFANTEGGTIYLGIEEKKIEDKKVFVSVGVEDPEKMIEDFWNALYGRSKVSQNILSNKDVKIVNIENKACIEIHVPEAPYSKKPIYVDNKKDLVYKRVDDADRIATEEEYKFMIVNSQDDIDTELLDNYDMSDLNHESIENYRKLLLKNTNDERYANMSQLDLMIDLGAYRKDRSSKDKQYKMTTACLLFFGKYNAISDRFPGFQLDYFKKTNYLDTDWKDRISSGDLGNEDLNVYSFFEKVLIKLTDNIEESFSLNDGLTRQNYARDLKVAIREALVNTLMHAYYDTKQSIKIVNCEDFIEFYNPGNMRINKEDFIHGGHSKDRNSILSTLFRRVGYSEKAGSGGPRIFDVVNRHKLKTPEIELTDMDTNVVLWKQDLMKEFEKYPELDKKVIKYIIDYGSISKGEALKMENMTEYQFRNILKKLKDDNLIKKEGEGPATKYVLIESKEADILRTKKVIKSLESFFRNK

SEQ ID NO: 5775 - DNA, 1050 bp, Staphylococcus aureus
ttgatacctacgctagaagaaattattgataagtatggaaacttagttgattatttgaaatttgatgtaacagttgaggtttatgaagatttgttgttattaagaagtttaagcgatttaaatgaacatcaaaagatggatagagtttcatttataaaaaaacatttaaactcaaatttcgattatttattagatgatactgagtttagaagtatcaataagatttacagtaatttaaatatcatgacgcatatcaatagtcaaaataataattttaaacgtaatccatttataaatgaagaacaattgaaatcactactcgcgataaagaaagtagatgcacatatgagttatgattcaaatattacttcaaaagcattggcagaaataaacaaaacgcaaaaaagattagttacaaagatagacacactctataatcagtcaaaaaaagaaaatgaatatgtacggttaggagaaaaaatatcgtatacaaaattggagaatcattggaaatatttatataatgagattcagttttataatcttaataatcaattgattagttatgttgcattagaacaggaatatgcttgggcttttttaaatgaactattttatttgatagaattgtatttgaaggcatttaaaggacaaaagaaaacagattatgagtttgggaaaaaattaaacgaatttattcaatcatatgtcattattttacttatagatatacgattacctgttgttagattatatattattagagacattgtagatacatgtgaaggagaaaaagataattacaaaagaattacactgatagaagaatctattaaaaagtatagatacgtaaaagatcagattaaaagatttaaaaatggattagaagaatcgttattaaatgcaactttatctattgaacaaaatatgttgaaagttaaaattgattattataaagcctactgctttcctagagaaaaaacaaagcataacaatattgagtacaatgtatcgttgttttttaaagcattagatgccttaaagaaatag

SEQ ID NO: 5776 - protein, 349 aa, Staphylococcus aureus
MIPTLEEIIDKYGNLVDYLKFDVTVEVYEDLLLLRSLSDLNEHQKMDRVSFIKKHLNSNFDYLLDDTEFRSINKIYSNLNIMTHINSQNNNFKRNPFINEEQLKSLLAIKKVDAHMSYDSNITSKALAEINKTQKRLVTKIDTLYNQSKKENEYVRLGEKISYTKLENHWKYLYNEIQFYNLNNQLISYVALEQEYAWAFLNELFYLIELYLKAFKGQKKTDYEFGKKLNEFIQSYVIILLIDIRLPVVRLYIIRDIVDTCEGEKDNYKRITLIEESIKKYRYVKDQIKRFKNGLEESLLNATLSIEQNMLKVKIDYYKAYCFPREKTKHNNIEYNVSLFFKALDALKK

SEQ ID NO: 5777 - DNA, 294 bp, Staphylococcus aureus
atgactaacaaaagtcaagaatttaaagatttactagatgcagatttagccattgcatttaatttagcagtaggtactgaatttactattagtgatttaacacaaaaatcaggtatcacttgctctagagatgttcaacgagaggtaggccgttggttcgcatactttgtaaaacatgcaccacgtgttccatttgttattattggtaaaaattctcatggacacttagtttaccttaaaacaggaccgaatccatataataacagcaacccttcgaaaggaggtgttcgctaa

SEQ ID NO: 5778 - protein, 97 aa, Staphylococcus aureus
MTNKSQEFKDLLDADLAIAFNLAVGTEFTISDLTQKSGITCSRDVQREVGRWFAYFVKHAPRVPFVIIGKNSHGHLVYLKTGPNPYNNSNPSKGGVR

SEQ ID NO: 5779 - DNA, 1068 bp, Staphylococcus aureus
atgaatacgtggaaaaatgatttgtacgggagattaggagatgttattgaacttgagattgcaatacatctaatgattagaaaatatgaacgcaattcaatggataaatatatgaacattaatgagttttatcattatctattgcaaaaagacatagttatttatgattatgagacatttcatcgattctataaaacgagtaatattcataattacttgcgagtaaagctaagaccaaaaaaagcttgggaggaagaaaaggttattcatccagagtcttttaaaagtattttagcaatacgtttaggtgaaacaaaattgatggctggaactaaatacattgactccaatattaaaagcttaagccaaacttataaacaactaaattctaatattgaacagattttagataaaataagtaagaatacatttgacataaaattggaaccaaagttgattgcttataaaaatttatatgagttatacagttattttatggacgaaatagaaaactatagcaacgactttgagcaattacgagcgcttctatatttagaattagattactcatttgtactctataatgagttactaaggatgatacatttaatcaaaaagtataaactagctgctaatagtaagataatagaaaaagcaataggtgaaattagtatgaagttagcaaatatagaatttccatggctaagattagtagttctaagagcttttattgataatataaaaaaatatcatgatataaattcattgattaacgatattagtcatattatcaattatacgttatttgaaatcgaacagtggattgaacgagcagaaattgaagaaggaattagagatttaatgaatgtgaaatatggtagggttccttatctagatgcaattatagaaaacagatataaaagaaatagtattaaagaatattttatcttactcaaacatgaatttggaattagatggttaagaggtcgagactttaatgatcaagatagaaataggtttaatagagctatcaaatataaacctttgaatcttataggatataactaa

SEQ ID NO: 5780 - protein, 355 aa, Staphylococcus aureus
MNTWKNDLYGRLGDVIELEIAIHLMIRKYERNSMDKYMNINEFYHYLLQKDIVIYDYETFHRFYKTSNIHNYLRVKLRPKKAWEEEKVIHPESFKSILAIRLGETKLMAGTKYIDSNIKSLSQTYKQLNSNIEQILDKISKNTFDIKLEPKLIAYKNLYELYSYFMDEIENYSNDFEQLRALLYLELDYSFVLYNELLRMIHLIKKYKLAANSKIIEKAIGEISMKLANIEFPWLRLVVLRAFIDNIKKYHDINSLINDISHIINYTLFEIEQWIERAEIEEGIRDLMNVKYGRVPYLDAIIENRYKRNSIKEYFILLKHEFGIRWLRGRDFNDQDRNRFNRAIKYKPLNLIGYN

SEQ ID NO: 5781 - DNA, 1515 bp, Staphylococcus aureus
atgataactgaagagatgcttaaaaaaattgcaaatgtatttaacggggacgatgaaaatagtatttatgagtataaaacaggttcagatttagtgcgtttttttaatcagtactttaatagaaaggacacatacaaaaacccttttccatcaaggtggaggtatgttgttgatatattacagcagttgttacagacaaaaaaattagatgaattctttactgttattttaagtattcgttatatccaaacagaattacatcttagtgaagtagaggcagtgcaaaaatctaatgatgctttgttgtactttaataaattgttacaatatgacggttattatttagtatataaggatgataaatttatactaatggaaagggataaggatttaacatatttaacaagtggcggctacgctgatatttatctacagaaatcaactggtcttatcataaaaaagttaagaagtgagtattatagcgataaatcaatatgtagtaggtttaaaagagagtttgatattacaaagtccttatcatcaatggagttaattattgatgtatacgagtttgataatagtcgtctatcatattcaatggaaaaagccgatatgacattagagcattatattaataattatgaagtagatttagaaattaaaattaaaataattagactaatactttatacaatttctaatgtacatgaaaaaggtataattcatagagatttaagccctacaaatatatttttcactaatgggaatataaaggttgcagactttggcttaggtaaagatttaaatgttttgtattccaagcagacgctaaatactaatgcagtgggacaattattctattgtgcaccagagcaattacttgggctcaaagatagtagtaagagaagtgatgttttttctttgggaagaattattaattttatcatgactaggagccctaacaaagtttcacatatttttagaactgtgagtgaaaagtctacacacgagagttcagaatatcgacatgaaaatgctcaagatttattaaatcattttgaaaaggcattaaaatatcataatgataaaaataaaaatttagaaataaagaataagattaatcgaggtgtgtttgatgatgatgtagaatttttttatgcagctctttcagaaaacgaaatttgtcaggtgttattatcttcgacctctatggttaggaatacattaattgagttcatgaagaagaaggatagttatgcagaagtagcaatacaaaatattaatagtgaatataaaaaaatatgtaaaaattttgaagactatgatccattctcaaattttatgtatgaaatcctgaaggatagattttcatttagggtaaaagaaattgcagcgattattctcaatgagatagcatactcttttaacagatatcatgctcaaggattaattaaagatattatatcaattggaattgaaccaataatcgaagatattttaaaaggagataaataa

SEQ ID NO: 5782 - protein, 504 aa, Staphylococcus aureus
MITEEMLKKIANVFNGDDENSIYEYKTGSDLVRFFNQYFNRKDTYKNPFPSRWRYVVDILQQLLQTKKLDEFFTVILSIRYIQTELHLSEVEAVQKSNDALLYFNKLLQYDGYYLVYKDDKFILMERDKDLTYLTSGGYADIYLQKSTGLIIKKLRSEYYSDKSICSRFKREFDITKSLSSMELIIDVYEFDNSRLSYSMEKADMTLEHYINNYEVDLEIKIKIIRLILYTISNVHEKGIIHRDLSPTNIFFTNGNIKVADFGLGKDLNVLYSKQTLNTNAVGQLFYCAPEQLLGLKDSSKRSDVFSLGRIINFIMTRSPNKVSHIFRTVSEKSTHESSEYRHENAQDLLNHFEKALKYHNDKNKNLEIKNKINRGVFDDDVEFFYAALSENEICQVLLSSTSMVRNTLIEFMKKKDSYAEVAIQNINSEYKKICKNFEDYDPFSNFMYEILKDRFSFRVKEIAAIILNEIAYSFNRYHAQGLIKDIISIGIEPIIEDILKGDK

SEQ ID NO: 5783 - DNA, 150 bp, Staphylococcus aureus
atggacaataactttttagaaagactaaaagaaattttagaaccatatgacgatatagaatcaagtaaagatggttttgtatttggtggatatatagaatggcctactttagattattacaaagattttcaagttagtaagtatacctaa

SEQ ID NO: 5784 - protein, 49 aa, Staphylococcus aureus
MDNNFLERLKEILEPYDDIESSKDGFVFGGYIEWPTLDYYKDFQVSKYT

SEQ ID NO: 5785 - DNA, 1632 bp, Staphylococcus aureus
ttgaataagaaaacaagaaatgaaaacaaaaaaatgaagcatgcagctgaaaaaattattgttgataaagaattacgcgatagaggtagagataatctagaaaaagcatcatataatatagatactatgcttaataatgttgatcaacaaatagctatgaaaaaggagttacttagtcagctaagacaaagaagaaataactcacatcaatttaaaaagagagatttatatcacgataaaatattagaaaataagcttaattctgctcaagaaatttctaagaaaaatctaaatttaatagagttagataaagtaacaactattgatatagatcgagaagattttgattctattcagtataatagggagtttgcgcagctaaacagtataaacttagatagtccttttttaactttatatagcaaaacagaacaagttaaaatagcgaatcaagttgttcaacaatttgatttgctagaattagatgatatggattatctttttgctaccgctgcaggagtaattgcaggttttgttgacgttatgtatggcgggacaatagctaaaggtaaagatgcgaaaggcttacaaaaaattgttgataaaagtacagaagaattagtgaaaaaatatgctttacatgaaaaaatagcagagttgaataagcaaaagaagaatactaactcacaaaagtcaatagataacattaataaaaaaataaaagaaataaaaagaaataaaacaaatattaatctaaaaagtagtattaagtatttagaaaacaatcatctagttggatacgatactgcacattcgaaatatataacagaaatgattggaaagatgtcgcctgataatcatcatttattatcaatagcgcatgaacctagtttgttaggtttaattgtcggaataaaggatcaacttacaaacacttcaacttttatgactaaagaaggtaaaattataaatgtagtttcacaaaataaaaataacgaattaactggaaatatgtttgaacaaattatacaagcaacaaataattggtttggtcatattatgagtgatatatcaggctctagttcttctaaaggaagaggtagtggtttaccagtcccaggttggttctccttgcaaaaattacaatttggtaaaataccattaaatggaaaagatatgaccattgctcaagtttcagaatggatgtttaaaaatggttatgacataagagcgtttgcttcagaatcaatatctgttattatattcgaaacacttattagaatttactggttttataagcaatatttttattacggaaaaagtttaaaagaaagtattcctattgcaaacagtcgagaattgtctagattattacttataggctcagctacattttcatctatagatataggtcatggattaataaaaagtacttctaaaggtggagtgcacccaataggcattgctacctttataatgactgttaataagccaggcctactagatttaggttttagaagttatcaaaatgtgagatttgaattacaacatagaaaacatgtagaaaaaataattgaaacagatattttaatggagtatagaagaattaccatatcaaattctatattttag

SEQ ID NO: 5786 - protein, 543 aa, Staphylococcus aureus
MNKKTRNENKKMKHAAEKIIVDKELRDRGRDNLEKASYNIDTMLNNVDQQIAMKKELLSQLRQRRNNSHQFKKRDLYHDKILENKLNSAQEISKKNLNLIELDKVTTIDIDREDFDSIQYNREFAQLNSINLDSPFLTLYSKTEQVKIANQVVQQFDLLELDDMDYLFATAAGVIAGFVDVMYGGTIAKGKDAKGLQKIVDKSTEELVKKYALHEKIAELNKQKKNTNSQKSIDNINKKIKEIKRNKTNINLKSSIKYLENNHLVGYDTAHSKYITEMIGKMSPDNHHLLSIAHEPSLLGLIVGIKDQLTNTSTFMTKEGKIINVVSQNKNNELTGNMFEQIIQATNNWFGHIMSDISGSSSSKGRGSGLPVPGWFSLQKLQFGKIPLNGKDMTIAQVSEWMFKNGYDIRAFASESISVIIFETLIRIYWFYKQYFYYGKSLKESIPIANSRELSRLLLIGSATFSSIDIGHGLIKSTSKGGVHPIGIATFIMTVNKPGLLDLGFRSYQNVRFELQHRKHVEKIIETDILMEYRRITISNSIF

SEQ ID NO: 5787 - DNA, 522 bp, Staphylococcus aureus
atgcaaacaatcaaagaaatcgataagtataaaaacaatatccatgaatatggtaatgatataaataaattagagtcaaatgttaatgatgccaagaatgaactagcgagtaaaaataaagagtatcaagatttagtgattaatggaaaagtagaacaagcagataaattatatagtgagattgaaaaattagaagctgattatcgtgtaaaaaataaaaggttaactgtaatgaaacgctcacttaagcaagttgtaataaaaaattgtgaaagtatgactcaagtggctgatcgtttaagagatgaatatattgatgtgtatcaagctgatttaaataactatgagcaacttaaacaagaattacaagaagctgagaataaattgaaagcttataataatgagtactatataaagcagaaagagttatcacgctatattgatggaaagagacgagaaaatgatattcaaaatattgaatttattggcgcagttaatattattgaaccatttaatgtttaa

SEQ ID NO: 5788 - protein, 173 aa, Staphylococcus aureus
MQTIKEIDKYKNNIHEYGNDINKLESNVNDAKNELASKNKEYQDLVINGKVEQADKLYSEIEKLEADYRVKNKRLTVMKRSLKQVVIKNCESMTQVADRLRDEYIDVYQADLNNYEQLKQELQEAENKLKAYNNEYYIKQKELSRYIDGKRRENDIQNIEFIGAVNIIEPFNV

SEQ ID NO: 5789 - DNA, 150 bp, Staphylococcus aureus
atgaagaaattcttttttattgggcttttagtgtttgttgtctttttacagcagcaaccattatttggttcagctatgataaaaacaaatatggtactaaacaatatgataaaacattcaaagacgatgcttttgacaatgtatctataa

SEQ ID NO: 5790 - protein, 49 aa, Staphylococcus aureus
MKKFFFIGLLVFVVFLQQQPLFGSAMIKTNMVLNNMIKHSKTMLLTMYL

SEQ ID NO: 5791 - DNA, 309 bp, Staphylococcus aureus
atggcaaaacaaaaaatcagaatcagattaaaagcttatgatcaccgcgtgattgatcaatcagcagagaagattgtagaaacagcgaaacgttctggtgcagatgtttctggaccaattccgttaccaactgagaaatcagtttacacaatcatccgtgccgtgcataggtataaagattcacgtgaacaattcgaacaacgtacacacaaacgtttaatcgatattgtaaacccaacaccaaaaacagttgacgttttaatgggcttaaacttaccatctggtgtagacatcgaaatcaaattataa

SEQ ID NO: 5792 - protein, 102 aa, Staphylococcus aureus
MAKQKIRIRLKAYDHRVIDQSAEKIVETAKRSGADVSGPIPLPTEKSVYTIIRAVHRYKDSREQFEQRTHKRLIDIVNPTPKTVDVLMGLNLPSGVDIEIKL

SEQ ID NO: 5793 - DNA, 624 bp, Staphylococcus aureus
atggctaattatgatgttttaaaattagacggaactaaatcaggttcaatcgaattaagcgatgcagtattcggtattgagccaaataatagcgttttattcgaagctattaatttacaacgtgcttcattacgtcaaggtacgcatgctgttaagaatcgttcagcagtaagcggtggcggacgtaaaccatggaagcaaaaagcaccaagtcgtgctcgtcaaggtacaatccgtgctccacaatggcgtggcggtggtatcgtattcggaccaactccaagaagttatgcatacaaaatgcctaagaaaatgcgtcgtttagctttacgctcagcattatctttcaaagctcaagagaatggcttaactgtagttgacgcattcaacttcgaagctccaaaaactaaagaattcaaaaatgtattatctacattagaacaacctaaaaaagtattagtagttactgaaaacgaagatgtaaatgttgaattatcagcacgcaacatccctggcgttcaagtgacaactgctcaaggtttaaatgttttagatatcactaatgctgacagcttagtaattactgaagctgctgctaaaaaagttgaggaggtgctcggataa

SEQ ID NO: 5794 - protein, 207 aa, Staphylococcus aureus
MANYDVLKLDGTKSGSIELSDAVFGIEPNNSVLFEAINLQRASLRQGTHAVKNRSAVSGGGRKPWKQKAPSRARQGTIRAPQWRGGGIVFGPTPRSYAYKMPKKMRRLALRSALSFKAQENGLTVVDAFNFEAPKTKEFKNVLSTLEQPKKVLVVTENEDVNVELSARNIPGVQVTTAQGLNVLDITNADSLVITEAAAKKVEEVLG

SEQ ID NO: 5795 - DNA, 330 bp, Staphylococcus aureus
atgcgatgttcgatataccatactaatcttggctctaaaccattactacgtgttttccgctttgataacaagccagcgaaacaagtttcaaatattcacgtaacgttactcattgggtacgatgattactattactattatatcgatccactttggagtcatattcgtcgtggcctagttttacctgccatcattccaaatcgcaaacaaattattaaaattcgtaaagagaaaatggaatacagctttaattcaccaggaagaaagtgcatttatgtgcaaccacattcatatacaattgaaaatcaacaacaaaataaacacacgtaa

SEQ ID NO: 5796 - protein, 109 aa, Staphylococcus aureus
MRCSIYHTNLGSKPLLRVFRFDNKPAKQVSNIHVTLLIGYDDYYYYYIDPLWSHIRRGLVLPAIIPNRKQIIKIRKEKMEYSFNSPGRKCIYVQPHSYTIENQQQNKHT

SEQ ID NO: 5797 - DNA, 447 bp, Staphylococcus aureus
atgatacctgttgcattttcaatatcttgttcagttaaatggtttttaatgccgcttgaaccgttcgtttcaactttaattttaatacccattttatccgcttgctttttcaatgcatcacgtgccatatatgtgtgtgcaatacctgttggacaagcagttactgctaacacatatggctcattagattgtttagatgattgttctgcagttgcaacttgttgcgcttcagcttctgcctcttcttcttttgtcacttcatcatcagcctcatctatgatcgctagtacttcttcaggtgatgaagcatgtaataatttctcacgtacattttcatccattaaaataccagacaacttagctaaagcatctagatgtgtttgggcgccaccttctggcgctgcaatcataaagaataagtgtgctggttgcatatccaaactttga

SEQ ID NO: 5798 - protein, 148 aa, Staphylococcus aureus
MIPVAFSISCSVKWFLMPLEPFVSTLILIPILSACFFNASRAIYVCAIPVGQAVTANTYGSLDCLDDCSAVATCCASASASSSFVTSSSASSMIASTSSGDEACNNFSRTFSSIKIPDNLAKASRCVWAPPSGAAIIKNKCAGCISKL

SEQ ID NO: 5799 - DNA, 249 bp, Staphylococcus aureus
atgattggttatcatcccgattatgaatttttaaaatctgtaggcattcaaatcaatacaaatgaatttggaacagcgcctatgtataataaagagacatacgaaacaaatatcgaaaattgctacattgcaggtgtgattgctgcagggaatgatgcgaataccatttttattgaaaatggtaaattccacggtggcattattgctcaaagcatgctagctaagaaacaaacgccgttagaatcataa

SEQ ID NO: 5800 - protein, 82 aa, Staphylococcus aureus
MIGYHPDYEFLKSVGIQINTNEFGTAPMYNKETYETNIENCYIAGVIAAGNDANTIFIENGKFHGGIIAQSMLAKKQTPLES

SEQ ID NO: 5801 - DNA, 1380 bp, Staphylococcus aureus
atgggaaaatttggattgaatttctttaagccaacagaaaaatttaatgggaattggtcgatcctagaaagtaaaagtagagaatgggaaaaaatgtacagagaacgttggagccacgataaagaagtaagaacaacacatggtgttaactgtacaggctcatgttcttggaaagtatttgtgaaaaatggtgtgattacctgggaaaatcaacaaactgactatccaagttgtggtccggatatgcctgaatatgaaccgagaggatgtccacgaggtgcgtcattctcttggtatgaatacagtccgcttcgaatcaaatatccatatattcgtggaaaactctgggatttatggactgaagcattagaagaaaacaatggtaatcgcgttgctgcatgggcgtctattgttgaaaatgaagacaaagccaaacaatataagcaagcccgaggtatgggagggcacgtgcgttcaaattggaaagacgttacagagataatcgcagcacaattactgtatacaataaaaaaatatggtccagatcgaatcgcaggatttacacctattccagcgatgtcaatgattagttatgcagcaggtgctcgattcatcaatttgcttggtggtgaaatgcttagtttttatgactggtatgcagatttaccacctgcctctccacaaatttggggagagcaaacagatgtgcctgaatcaagtgactggtataacgcatcatacattattatgtggggctctaatgtacctttaacacgtactccggatgcacattttatgactgaagtccgctataaaggtacaaaagtcatttcagtagcaccagattacgcagaaaatgtgaaatttgcagataactggctagcaccgaatcctggttcagatgctgcaattgcacaagcaatgacgcatgttattttacaagaacattatgttaatcaacctaatgaacgctttataaattacgctaaacaatatacagatatgccgtttcttatcatgctggatgaagatgaaaatggatataaagcgggtcgatttttaagagcgagtgacttaggtcaaacaacagagcaaggcgaatggaagccagttattcatgatgcaatcagcgatagtttagtagtacctaatggcacaatgggtcaacgttgggaagaaggtaagaagtggaacttaaaactagaaacagaagatggttctaaaattaaccctacattatcaatgacagaaggtggatacgaattagaaacaattcaattcccgtactttgatagtgatggagatgggatattcaatcgtccaattccaactcgacaagtcactttagcaaagtccgtattgctacaatttttgacttaa

SEQ ID NO: 5802 - protein, 459 aa, Staphylococcus aureus
MGKFGLNFFKPTEKFNGNWSILESKSREWEKMYRERWSHDKEVRTTHGVNCTGSCSWKVFVKNGVITWENQQTDYPSCGPDMPEYEPRGCPRGASFSWYEYSPLRIKYPYIRGKLWDLWTEALEENNGNRVAAWASIVENEDKAKQYKQARGMGGHVRSNWKDVTEIIAAQLLYTIKKYGPDRIAGFTPIPAMSMISYAAGARFINLLGGEMLSFYDWYADLPPASPQIWGEQTDVPESSDWYNASYIIMWGSNVPLTRTPDAHFMTEVRYKGTKVISVAPDYAENVKFADNWLAPNPGSDAAIAQAMTHVILQEHYVNQPNERFINYAKQYTDMPFLIMLDEDENGYKAGRFLRASDLGQTTEQGEWKPVIHDAISDSLVVPNGTMGQRWEEGKKWNLKLETEDGSKINPTLSMTEGGYELETIQFPYFDSDGDGIFNRPIPTRQVTLAKSVLLQFLT

SEQ ID NO: 5803 - DNA, 252 bp, Staphylococcus aureus
gtgcatattaattcgagaatgttaaaaacgtcagctgtaatttctaatacattattagtcataggtttagtctgtctatttatgatgaaattagtgttagctattactttttttgctgtttcattatcaattagtctagttgtctttaatatgatgttcagagatagaacaacgatgaaagtaatcgttaacgcttcttttttaatcgtaatattagcgattgtagtggcatattttttattgtctaagtaa

SEQ ID NO: 5804 - protein, 83 aa, Staphylococcus aureus
MHINSRMLKTSAVISNTLLVIGLVCLFMMKLVLAITFFAVSLSISLVVFNMMFRDRTTMKVIVNASFLIVILAIVVAYFLLSK

SEQ ID NO: 5805 - DNA, 243 bp, Staphylococcus aureus
atgaatcgaattgaaaaacatgccaaaaacacttttattattctgatgctcattatgttattttggatttttatgagttttattttccagaaattattatttccaccttcgaaaaataatttaactacatatgaagcattaaaatattatacacatttaaagggatattacggtttggatcataatatcaaaaggaatagcatacattgcctgtgtgttaattccattcaatttcttttttag

SEQ ID NO: 5806 - protein, 80 aa, Staphylococcus aureus
MNRIEKHAKNTFIILMLIMLFWIFMSFIFQKLLFPPSKNNLTTYEALKYYTHLKGYYGLDHNIKRNSIHCLCVNSIQFLF

SEQ ID NO: 5807 - DNA, 147 bp, Staphylococcus aureus
atgtctctaacgcctttaatggtattgaacgcaattgggaaaaaagcagcgataaaaataatcgcaatcgctggcaaactaccaataccaaaccatagaacaacaaatggtgcccaagctatcggagatatcggcctaatcaattga

SEQ ID NO: 5808 - protein, 48 aa, Staphylococcus aureus
MSLTPLMVLNAIGKKAAIKIIAIAGKLPIPNHRTTNGAQAIGDIGLIN

SEQ ID NO: 5809 - DNA, 207 bp, Staphylococcus aureus
atggtagccaacttacgttccgctagagtagaacgttgccaggcaaaaatggatgcgatgagccgcattgagaccgtgaggtctctttttttatgtctaaaacgtcaaaataaaaagttaacacaaagaaaatggcttgacgaagtgaaaacgtttgaatctgacgaaacgagaaaagagcgcaacgagtttagtagagctaaatga

SEQ ID NO: 5810 - protein, 68 aa, Staphylococcus aureus
MVANLRSARVERCQAKMDAMSRIETVRSLFLCLKRQNKKLTQRKWLDEVKTFESDETRKERNEFSRAK

SEQ ID NO: 5811 - DNA, 1275 bp, Staphylococcus aureus
atgaaattaaaaccttttttacccattttaattagtggagcggtattcattgtatttctattattacctgctagttggtttacaggattagtaaatgaaaagactgtagaagataatagaactacattgacagatcaagtactaaaaggcacactcattcaagataagttatacgaatcaaacaagtattatcctatatacggctctagtgaattaggtaaagatgacccatttaatcctgcaattgcattaaataagcataacgccaacaaaaaagcattcttattaggtgctggtggttctacagacttaattaacgcagttgaacttgcatcacagtatgataaattaaaaggtaagaaattaacatttattatttcaccacaatggtttacaaaccatggtttaacgaatcaaaactttgatgctcgtatgtctcaaactcaaattaatcaaatgttccagcagaaaaacatgtctactgaattaaaacgtcgttatgcacaacgtttattacagtttccacatgtacacaataaagaatacttgaaatcttatgctaaaaaccctaaagaaactaaagatagttatatttctggttttaaagagaatcaattgattaaaatagaagcgattaaatcattgtttgcaatggataaatctccattagaacatgttaaacctgctacaaaaccagacgcttcttgggatgagatgaaacaaaaagcagttgaaattggtaaagctgatactacatcgaataaatttggtattagagatcaatactggaaattaattcaagaaagtaagcgtaaagttagacgtgactacgaattcaatgttaattctccagaattccaagatttagaattacttgtaaaaacaatgcgtgctgctggtgcagatgttcaatatgtaagtattccatcaaacggtgtatggtatgaccacataggtatcgataaagaacgtcgtcaagcagtgtataaaaaaatccattctactgttgtagataatggtggtaaaatttacgatatgactgataaagattatgaaaaatatgttatcagtgatgccgtacacatcggttggaaaggttgggtttatatggatgagcaaattgcgaaacatatgaaaggtgaaccacaacctgaagtagataaacctaaagatattgatttagttgtatggacagcaggaattcaacctgttgaagttgttcgtaacttgccgattgatataaatagtaatatgcgcttggatatgtggcaataa

SEQ ID NO: 5812 - protein, 424 aa, Staphylococcus aureus
MKLKPFLPILISGAVFIVFLLLPASWFTGLVNEKTVEDNRTTLTDQVLKGTLIQDKLYESNKYYPIYGSSELGKDDPFNPAIALNKHNANKKAFLLGAGGSTDLINAVELASQYDKLKGKKLTFIISPQWFTNHGLTNQNFDARMSQTQINQMFQQKNMSTELKRRYAQRLLQFPHVHNKEYLKSYAKNPKETKDSYISGFKENQLIKIEAIKSLFAMDKSPLEHVKPATKPDASWDEMKQKAVEIGKADTTSNKFGIRDQYWKLIQESKRKVRRDYEFNVNSPEFQDLELLVKTMRAAGADVQYVSIPSNGVWYDHIGIDKERRQAVYKKIHSTVVDNGGKIYDMTDKDYEKYVISDAVHIGWKGWVYMDEQIAKHMKGEPQPEVDKPKDIDLVVWTAGIQPVEVVRNLPIDINSNMRLDMWQ

SEQ ID NO: 5813 - DNA, 288 bp, Staphylococcus aureus
ttggaagcggtagacatcttgccaaatgaaaaagtagccatcgtgaataataataatggtgcacgttttgaaacatacgtaatagctggtgaaagaggtagtggtaaaatttgtttaaatggtgcagcatcaagacttgttgaagtaggcgatgtagtcataatcatgacttatgcacagttgaatgaagaagaaattaaacaccatgcacctaaagtagcagtaatgaatgaagacaatgtcattattgaaatgattcatgaaaaagaaaatacgatagtgttataa

SEQ ID NO: 5814 - protein, 95 aa, Staphylococcus aureus
MEAVDILPNEKVAIVNNNNGARFETYVIAGERGSGKICLNGAASRLVEVGDVVIIMTYAQLNEEEIKHHAPKVAVMNEDNVIIEMIHEKENTIVL

SEQ ID NO: 5815 - DNA, 315 bp, Staphylococcus aureus
atgcaaaaagttgaaagtatcataattggtggagggccatgcggattaagtgcggctattgaacaaaaaagaaaaggtattgataccttaattattgaaaaggggaatgtcgttgaatcaatctataattatcctactcaccaaacatttttctcatcaagtgataaattaagtattggggacgtaccgtttatcgttgaagaaagtaaaccaagacgtaatcaagcgctagtttattaccgagaagttgtaaaacatcatcaattaaaagtaaatgcatttgaagaagtattaactgttaaaaaaaatgaataa

SEQ ID NO: 5816 - protein, 104 aa, Staphylococcus aureus
MQKVESIIIGGGPCGLSAAIEQKRKGIDTLIIEKGNVVESIYNYPTHQTFFSSSDKLSIGDVPFIVEESKPRRNQALVYYREVVKHHQLKVNAFEEVLTVKKNE

SEQ ID NO: 5817 - DNA, 771 bp, Staphylococcus aureus
atgagtcaagcagccgaaacattagatggttggtatagtctacatttattttatgcagttgattgggcatcattacgtctagttccaaagaacgaacgcgatgcacttgtcactgaatttcaatcatttttagaaaatacagcaactgtaagatcatcaaaatctggtgatcaagctatttataatataactggtcaaaaagcagatttgttattatggttcttacgtcctgaaatgaagtctttaaatcatattgaaaatgaatttaacaaattgcgcattgctgacttcctaatccctacatattcatatgtttcagtcattgaattgagcaattatttagctggtaaatctgatgaagatccttatgagaaccctcatatcaaagcaagattatacccagaattaccacattctgattatatttgtttctatccaatgaacaaacgtcgtaatgaaacttataactggtacatgttaactatggaagaacgccaaaaattaatgtatgaccatggtatgattggtagaaaatatgctggcaaaatcaaacaatttattactggttctgtagggtttgatgatttcgaatggggcgtaacattgttctcagatgacgtattacaattcaaaaaaattgtatacgaaatgcgctttgatgaaacaacagcacgatacggtgaattcggtagtttctttgtaggacatattattaacacaaacgaattcgatcaattctttcgatttcttaatacattggtacgtttataa

SEQ ID NO: 5818 - protein, 256 aa, Staphylococcus aureus
MSQAAETLDGWYSLHLFYAVDWASLRLVPKNERDALVTEFQSFLENTATVRSSKSGDQAIYNITGQKADLLLWFLRPEMKSLNHIENEFNKLRIADFLIPTYSYVSVIELSNYLAGKSDEDPYENPHIKARLYPELPHSDYICFYPMNKRRNETYNWYMLTMEERQKLMYDHGMIGRKYAGKIKQFITGSVGFDDFEWGVTLFSDDVLQFKKIVYEMRFDETTARYGEFGSFFVGHIINTNEFDQFFRFLNTLVRL

SEQ ID NO: 5819 - DNA, 285 bp, Staphylococcus aureus
atggctgaaaagaaattggcacaaattggagatgaaataaatgaaaaatggcctggaacgataacgagtattgttcatagaatagggccattacaaatttcagatatcgctgtattaattgcagtttcttcaccgcatcgtaaagatgcctatcgagcaaatgaatatgcaattgagcgtataaaagaaattgttccgatttggaaaaaagaaatttgggaagatggttcaaaatggcaagggcatcaaaaagggaattatgaagaagcgaagagggaggaataa

SEQ ID NO: 5820 - protein, 94 aa, Staphylococcus aureus
MAEKKLAQIGDEINEKWPGTITSIVHRIGPLQISDIAVLIAVSSPHRKDAYRANEYAIERIKEIVPIWKKEIWEDGSKWQGHQKGNYEEAKREE

SEQ ID NO: 5821 - DNA, 1053 bp, Staphylococcus aureus
gtggcatttgcctttgtgggtgttgtcgttggtgccggctttgctactggtcaagaaattttccagtttttcacaagtcatggcgcatatagcatttcaggcattattgtaacaggactattgattactttaggtggaatgattgtcatgcatacaggtcatcatctaaagtctagaaatcattctgattcaattaactatttcttatacccctctattgcaagaggttttgatattattttgacaatgtttatgttgtctttagctattattatgactgcaggtggtgcgtcaaccattcatcaaagtttcaacttaccgtattggctgagcgcactcatattagtcgcctttattttagcaacactgtttctaaaattcgatcgtttaattgctgtgcttggcggtgttaccccatttttaattgcgattgtcattatgattgcggtctactatttcacaacaagtcatcttgattttactgccgctaataatgatgctcagattcataagcagaaatcattatcacctggatggtggtttgatgcgattaactatgcaagtttgcaaattgctgctgccttcagcttcttatcagtgatgggtagcaaagttaaatatcgtgactcaacgttatatgggggcttgattggcggtttaatcattacatttttactcatgatgattaatctaggtttaatttctcaattcgataaaattaaacacgtcgatttacctacattaaaattagcgacacaaatgtctccgtcaattggtattattatgtctgtcattatgatacttgtcatctacaatactgttgttggattaatgtatgcatttgcgtcacgtttcagcgttccattcagcagacgttacttcatcattattattacaatggctgtcatcacttatattagtacatttatcggtttcatttcattaattggaaaagtattccctattatgggattgttcggtttcatcttactcatacctgtactctataaaggtttaattaagcgtattaccggcaaatctcatatcgattaa

SEQ ID NO: 5822 - protein, 350 aa, Staphylococcus aureus
MAFAFVGVVVGAGFATGQEIFQFFTSHGAYSISGIIVTGLLITLGGMIVMHTGHHLKSRNHSDSINYFLYPSIARGFDIILTMFMLSLAIIMTAGGASTIHQSFNLPYWLSALILVAFILATLFLKFDRLIAVLGGVTPFLIAIVIMIAVYYFTTSHLDFTAANNDAQIHKQKSLSPGWWFDAINYASLQIAAAFSFLSVMGSKVKYRDSTLYGGLIGGLIITFLLMMINLGLISQFDKIKHVDLPTLKLATQMSPSIGIIMSVIMILVIYNTVVGLMYAFASRFSVPFSRRYFIIIITMAVITYISTFIGFISLIGKVFPIMGLFGFILLIPVLYKGLIKRITGKSHID

SEQ ID NO: 5823 - DNA, 198 bp, Staphylococcus aureus
atgaacttttttgatatccataagattccgaacaaaggcattccattatcggtacaacgtaaattatggcttagaaacttcatgcaagctttctttgtagtgttctttgtttatatggctatgtatttaattcgaaacaactttaaggcggcccaaccgtttttaaaaggttcttcatcttttatggtgggaaggtaa

SEQ ID NO: 5824 - protein, 65 aa, Staphylococcus aureus
MNFFDIHKIPNKGIPLSVQRKLWLRNFMQAFFVVFFVYMAMYLIRNNFKAAQPFLKGSSSFMVGR

SEQ ID NO: 5825 - DNA, 864 bp, Staphylococcus aureus
ttgaaacacattaatcaattttctgaatcgacactagcacaactagaaaaagatcaacaacacgtattttatgtatactgtttgatggacccaagaaatgatgaatgcttttatgttggtaaaggtaaggggaatagaatatttaaacataaacaagatgcgcagaaaaaagtattgtacgaagatatatttatagaagaaaataaagataacttgaaatttaatagaattaacgaaatttgtagcaatgatttgaatgttttaggatatataatcagttatggattaaccgaatctgaagcattttctgcagaaaatgttcttataaactttcttaacctaacaaataaaactacattaacaaatatgattaacggtcatggatctaaggcatacttagttgaagatttagaaaatgaatttggctacgattcaattaatcttgaaaacataaatacgaatgaattaattttagcagtgaaaatcagagatgcatttctattagataaggatgaaagtaaagagtatcctattaatgaaagtaaacgtgatagaaataaccttaaatcgcgtacattaggtagttggataataggaaaagataaaatacataaaataaaatatattattggtatcaatacaggtgctaataatgcagttgtctcagcttatgaagtatcatttgaacaagcggagagtatcgaaacaaataatggtagaatgagatatgcgtttattgggctttcagaaagagatgctactctaaaaaaattgaatttatacaaaaaagcactaccagatttaagatttggtagtggtagcgctacagcatatataaataatgggacaatgaaagttgattaa

SEQ ID NO: 5826 - protein, 287 aa, Staphylococcus aureus
MKHINQFSESTLAQLEKDQQHVFYVYCLMDPRNDECFYVGKGKGNRIFKHKQDAQKKVLYEDIFIEENKDNLKFNRINEICSNDLNVLGYIISYGLTESEAFSAENVLINFLNLTNKTTLTNMINGHGSKAYLVEDLENEFGYDSINLENINTNELILAVKIRDAFLLDKDESKEYPINESKRDRNNLKSRTLGSWIIGKDKIHKIKYIIGINTGANNAVVSAYEVSFEQAESIETNNGRMRYAFIGLSERDATLKKLNLYKKALPDLRFGSGSATAYINNGTMKVD

SEQ ID NO: 5827 - DNA, 198 bp, Staphylococcus aureus
ttgagtcattccgttaaagttgcaatttctatctatttagcacttatctttataacgttcacttcttatttagtcattattttatatacgagtatgactggacatgatgtatcacatttcgtgttagatagtcagcattctcatcatggatctcttacgcaaaaacatttgagtcttcctgaaatctcatttaaatag

SEQ ID NO: 5828 - protein, 65 aa, Staphylococcus aureus
MSHSVKVAISIYLALIFITFTSYLVIILYTSMTGHDVSHFVLDSQHSHHGSLTQKHLSLPEISFK

SEQ ID NO: 5829 - DNA, 162 bp, Staphylococcus aureus
atgagcaacatttataaaagctacctagtagcagtactgtgctttacagtcttagcaattgtacttatgccttttctgtacttcactacagcatggtctcttgcaggattcgcaagtatcgcaatactcatattttttaaagaatacttttatggaaagtaa

SEQ ID NO: 5830 - protein, 53 aa, Staphylococcus aureus
MSNIYKSYLVAVLCFTVLAIVLMPFLYFTTAWSLAGFASIAILIFFKEYFYGK

SEQ ID NO: 5831 - DNA, 351 bp, Staphylococcus aureus
ttgattgaaataaatcctggcaatccagcagttcctaatgcgattgctttaaccttgaagaaagcaatatatgctgaaccaatacctgatccaacgatagcgccaataaatggatatcttagttttaagttaacaccaaacatagccggttctgtaataccaagtaatgctgaaatacctgcggcagatgccacaccttttaacttcttattttgtttaataataaagaacgctgcaattgctgcaccaccttgtgcaacattagacattgtcgcaatcgggaatataaatgatccacccgttttagtggcatctgcaattaatgtcgtttctacagctataaagctatga

SEQ ID NO: 5832 - protein, 116 aa, Staphylococcus aureus
MIEINPGNPAVPNAIALTLKKAIYAEPIPDPTIAPINGYLSFKLTPNIAGSVIPSNAEIPAADATPFNFLFCLIIKNAAIAAPPCATLDIVAIGNINDPPVLVASAINVVSTAIKL

SEQ ID NO: 5833 - DNA, 159 bp, Staphylococcus aureus
atggaacagtatggttggacattaactgaagttagagaccagccatacttaaagttgttagaaatacttaatgaagatagtgatgaagagtcagaagaaaaacaaagcgaacaaaaggtaatcacaggaacggatttaaggaagctttttggaagctag

SEQ ID NO: 5834 - protein, 52 aa, Staphylococcus aureus
MEQYGWTLTEVRDQPYLKLLEILNEDSDEESEEKQSEQKVITGTDLRKLFGS

SEQ ID NO: 5835 - DNA, 420 bp, Staphylococcus aureus
atgtatgaatatgaatcaaaatatccaaatcctaatgattttcaatgtcctccaaaagaagcaaatttcgctgaaggtataacattttataaatgtagcgacacatatgaattgccaagccagtacatggaacctatgatagaaaaaggttcaagatttcctaaaaacaatgaagaaagatgtttaatgtgtggtcattctgtctttgtggatgataaggatatatttgaattgattaacaaaaaaggtagaatagcaaaaggaataaaagataaatggagatttgtcttttattttgaaggaagccaatttagtaaatataaatttacaccttcaaaaagtaataaaaagcactatacatattggcattatgggagtaacgatataatatatagctataagagtgctataaacgaatga

SEQ ID NO: 5836 - protein, 139 aa, Staphylococcus aureus
MYEYESKYPNPNDFQCPPKEANFAEGITFYKCSDTYELPSQYMEPMIEKGSRFPKNNEERCLMCGHSVFVDDKDIFELINKKGRIAKGIKDKWRFVFYFEGSQFSKYKFTPSKSNKKHYTYWHYGSNDIIYSYKSAINE

SEQ ID NO: 5837 - DNA, 441 bp, Staphylococcus aureus
atgaaattacatgatttaaaaccggcagaaggttcacgtaaagaacgcaatcgtgttggacgtggtgttgcgacaggtaacggtaaaacaagtggtcgcggacacaaaggtcaaaaagctcgttcaggcggtggtgtaagaccaggattcgaaggtggtcaattaccattattccgtcgtttaccaaaacgtggttttactaacataaatcgtaaagaatatgctattgttaacttagaccaacttaataaatttgaagatggtactgaagtaaatccagctttattagtagaatctggtgttgttaagaatgaaaaatctggtatcaaaatactaggtaatggttcacttgataagaaattgacagtgaaagctcataaattctcagcttcagcagcagaagctattgatgctaaaggtggagcacacgaggtgatctaa

SEQ ID NO: 5838 - protein, 146 aa, Staphylococcus aureus
MKLHDLKPAEGSRKERNRVGRGVATGNGKTSGRGHKGQKARSGGGVRPGFEGGQLPLFRRLPKRGFTNINRKEYAIVNLDQLNKFEDGTEVNPALLVESGVVKNEKSGIKILGNGSLDKKLTVKAHKFSASAAEAIDAKGGAHEVI

SEQ ID NO: 5839 - DNA, 738 bp, Staphylococcus aureus
atgaaatctttaatattagctgaaaaaccatcagtcgcaagagatattgctgatgctttacaaataaatcaaaagcgtaatggttactttgaaaataaccaatatattgtcacgtgggcgttagggcatctagtaacaaatgcgacacctgaacaatacgataaaaatttaaaggaatggcgattagaagaccttccaattatacctaaatatatgaaaactgttgttattggtaaaacaagcaaacaatttaaaacagtaaaagcgttaattttagataataaagtgaaagatattattattgcaacagatgctggacgagaaggtgaactagttgcaagattgattttggataaagttggtaacaaaaagccactccgtcgattatggattagctcagttactaaaaaagctattcaacaaggttttaaaaatttaaaagacggtcgccaatataacgatttgtattatgcagcgttagcgagaagtgaggcggattggattgttgggattaatgcaacgcgtgcactaacaacaaagtatgatgcacagctatccctgggacgtgttcagacaccaacgattcagttagtaaatacacgacaacaagagattaatcagttcaaaccacaacaatactatacattatcattaacggtaaaagggtttgattttcagctagaatcaaatcagcgatataccaataaagaaactttagaacagatagttaataattaa

SEQ ID NO: 5840 - protein, 245 aa, Staphylococcus aureus
MKSLILAEKPSVARDIADALQINQKRNGYFENNQYIVTWALGHLVTNATPEQYDKNLKEWRLEDLPIIPKYMKTVVIGKTSKQFKTVKALILDNKVKDIIIATDAGREGELVARLILDKVGNKKPLRRLWISSVTKKAIQQGFKNLKDGRQYNDLYYAALARSEADWIVGINATRALTTKYDAQLSLGRVQTPTIQLVNTRQQEINQFKPQQYYTLSLTVKGFDFQLESNQRYTNKETLEQIVNN

SEQ ID NO: 5841 - DNA, 336 bp, Staphylococcus aureus
atgaaacttaaaaatatcagaaactacacacaccaagaacttcaagatgttttaactcaagtgaaagcagaattacaattaggagaaatcaatgatgaagcggttatcatattagcaaactaccaagaacaagaagaagatggtcaacaatattacgaaatctatcattcagaaattagaattgatgaagatacaactttagaagatgcacaagaacaacaaatcgaaacagaaaaacttgtccgtgaatataaaacgaagcgtggattgttacaagcctttatcaacgaagaagaaattaaaggtgcttattataaaattcatacgcaactataa

SEQ ID NO: 5842 - protein, 111 aa, Staphylococcus aureus
MKLKNIRNYTHQELQDVLTQVKAELQLGEINDEAVIILANYQEQEEDGQQYYEIYHSEIRIDEDTTLEDAQEQQIETEKLVREYKTKRGLLQAFINEEEIKGAYYKIHTQL

SEQ ID NO: 5843 - DNA, 201 bp, Staphylococcus aureus
atgataacggtcacaaaaaaggatttagttgagctaggatatggaacttctttttcagcagacatcataaaaaaagcaaaagaattgatgattacaaaagggcatatctactatcaatctcgaaagctagatagagtccctcgtgaagctgttgaagaaattctaggaattcggttttcaaatgaaaacaggtctgagtag

SEQ ID NO: 5844 - protein, 66 aa, Staphylococcus aureus
MITVTKKDLVELGYGTSFSADIIKKAKELMITKGHIYYQSRKLDRVPREAVEEILGIRFSNENRSE

SEQ ID NO: 5845 - DNA, 1749 bp, Staphylococcus aureus
atgataagctctaaaagtattgaaaatcatgcagttacaaaaattgagactatggctaataatacaatgaaaattaatccttatataaattcaaatgataataaaatatcttttgatggggaattggaaatttacgattctgaagatataaataaaacctcttatcttggtgctatacaaatacaggttaaaggaaagcaagtggctaaaagaggagaaaaagttatccatcgaaataatgtaaaaattaatgatttaaaagcttatgaaaaagaagggggcgtttattattttgtagtctatttaattgtggaaaatggaaaggttatagataatcaactttatggtagacaattacatcaaatatacttgaattctttactagaaaaagatcaaaatagtacaactatagaaatgtatgaaatagaagatgaaaatattttatataaaaactgtttaaattatttaaaaaccaaaaggcagcaaagttatataaatcaattaaaaattaaagatatagaaaaagagccaatttacataaacacaccagaaaatatcatttttgatggacgaggatttcccttaaatgatttttatagttacagacatataaattcttctaaggtcgagttaactatacctgatggaattttaaagatggaaaaattaaaaacaacaaaaaaaagaaaaattaaaaaaaataataaagtaatatttgaagggttaatagattttgaaattacaaaagaaatgacagctttaataattgataatatttttgaattacaaatgtgtgaaacaacaaaaaaaagtaaatataaaatgttaccttttaagaatttagatattaagtcagacactttttatataatcaatgaaatttctaaaggtggtacattttggatagatacagtcaaattaaatgtaaaaccttttaaaatagacatttataggattaaaaaagacttagacaaattaaatgttaagctagtagagtatagcaatttaattcctaaaaacattaatttaaaaccagacagctttataaagcagatgagagaaatagttggattatacgaattgttagaaaataaagatttcgaaggttttaaaatgaatagtaataatttttataaactaaatttttgcggtaaaaaattattattatataagtataattcggaattatataatgtatactctatggaatttatgaatcgttttgagatatttacgaaagatatggtagaaaaagtgccgattatttatatattcactaaaagtaagattaaagatatattgaattttgatattaatctcgttaaaaaatttattgagacagataaccttaatgaaccttctgattttaaatgggaaaaagttaataatttctcattagagttaatagatgtttacgattatacaaaggcaatagaatatttagatttagctgagtatatattgcataaattagataacaaagataatgacaaacgttttattaatttaattaataaagctcaaataatgaaaagaaaaaatatagaagttaaagaaataatatctgaattgatagaattacatagtaaattaataagtgttgataaagaattagcttatctaaatatcaacgtaatagcaggcagtaaacaggaagctgaaactagatatcaaaatttagacaaaaacaatttgaaaaactttgaagactatccgatttttaagttgtatcaagatttagttaattaa

SEQ ID NO: 5846 - protein, 582 aa, Staphylococcus aureus
MISSKSIENHAVTKIETMANNTMKINPYINSNDNKISFDGELEIYDSEDINKTSYLGAIQIQVKGKQVAKRGEKVIHRNNVKINDLKAYEKEGGVYYFVVYLIVENGKVIDNQLYGRQLHQIYLNSLLEKDQNSTTIEMYEIEDENILYKNCLNYLKTKRQQSYINQLKIKDIEKEPIYINTPENIIFDGRGFPLNDFYSYRHINSSKVELTIPDGILKMEKLKTTKKRKIKKNNKVIFEGLIDFEITKEMTALIIDNIFELQMCETTKKSKYKMLPFKNLDIKSDTFYIINEISKGGTFWIDTVKLNVKPFKIDIYRIKKDLDKLNVKLVEYSNLIPKNINLKPDSFIKQMREIVGLYELLENKDFEGFKMNSNNFYKLNFCGKKLLLYKYNSELYNVYSMEFMNRFEIFTKDMVEKVPIIYIFTKSKIKDILNFDINLVKKFIETDNLNEPSDFKWEKVNNFSLELIDVYDYTKAIEYLDLAEYILHKLDNKDNDKRFINLINKAQIMKRKNIEVKEIISELIELHSKLISVDKELAYLNINVIAGSKQEAETRYQNLDKNNLKNFEDYPIFKLYQDLVN

SEQ ID NO: 5847 - DNA, 1830 bp, Acinetobacter baumannii
atgaacagtaaaaatattgcacttattggtaacccaaattgtgggaaaacatctctctttaatactttaacaggtactcgtcaaaaagtagctaattatgctggtgttactgttgagcggaaagaaggtttctttaaactaccttctggtgaatcagttcgagttttagatttgcccggcacatacagcttaaagcctacgagtctagatgaagaggtaacaagggctgtatgcttaggtgagcttgagggtgaggttctacctgatatatatgtatgtgtggttgatgccactaatttacatttacatttaagtcttgtgcttgaaataagggcattgaatcgaccaatgcttcttgttttaaatatgatggatgaggtcaaaaagcgtggtatttcgatagatattaataagctatcagaattgttgggtatccctgttattgaggctgttgccgttaaaactaaaggcgtgcaagaactactaaatcaattagatcaaaaaaatctatttgtcactccttatcattctgatctgaatcattttgatcagattaaaaatattactaaacaggtaattttaaaaaatgataacggtgatgcaagaacagctttcttggataaaattttcttacatcctgtacttggtttactcatcctaacgcttaccatgtttgtcatgttccaagccgtttttatctgggcacaaccttttatctcattaattgaaaatgcaattgcttggttaggagatacaattggcccgcttattactcatccattacttagaagtcttattgttgatggggtaatcgctggatcaggtagtgttttggcttatatgccgcagatccttatcttattcttctttattttaattttagaagaatcaggttatttgccacgagcagcattccttttggataaattaatgtccaaagctggtttaagtggacgttcctttattccattattgtctagttttgcctgtgcaattcctggtgtcatggcaacacgaagcattagttcggaaagagatcgtctagcaaccattatgattgcgccattaatgacttgttctgcaagattacctgtttatgctttacttattgcggcattcattccaaacaaattagtttatggttggttgagtctacaaggtttagttctttttggactatatatggctggcattgtttcagcactatgtgtttctttgtttttgaaactagttagaaaagataaaacagaaagtatttttatctttgagttgcctacttaccgattaccagatattcgaaacgttgcattaggactttatgatcgagctacgatctttttaaaaagggttggcggcattatcgtagcattatctatattgctttgggtattggttacgttccctcaacctcctgagcatgccacaatgcctgctatcaactatagtttagctggacaacttggacacattattcagcctatatttgcacctattggctttacttgggaaatctgtattgcattaattcctgctatggctgcaagggaagttgtcattgctgctttaggtgtaatttatgccatgtctggagatgaagatactgtaactcaaacattgttgagtcaaatctctggtcctgatggttggggactagctacagggatgtcattattagtttggtacattttcgcaccacattgtcttgcaacattagcgaccattcgtcgtgaaactggtagctggaaacagcctgttattatggcgacttacttatttgggcttgcatatttctttgccttcattacatatcagcttattagtagactttaa

SEQ ID NO: 5848 - protein, 609 aa, Acinetobacter baumannii
MNSKNIALIGNPNCGKTSLFNTLTGTRQKVANYAGVTVERKEGFFKLPSGESVRVLDLPGTYSLKPTSLDEEVTRAVCLGELEGEVLPDIYVCVVDATNLHLHLSLVLEIRALNRPMLLVLNMMDEVKKRGISIDINKLSELLGIPVIEAVAVKTKGVQELLNQLDQKNLFVTPYHSDLNHFDQIKNITKQVILKNDNGDARTAFLDKIFLHPVLGLLILTLTMFVMFQAVFIWAQPFISLIENAIAWLGDTIGPLITHPLLRSLIVDGVIAGSGSVLAYMPQILILFFFILILEESGYLPRAAFLLDKLMSKAGLSGRSFIPLLSSFACAIPGVMATRSISSERDRLATIMIAPLMTCSARLPVYALLIAAFIPNKLVYGWLSLQGLVLFGLYMAGIVSALCVSLFLKLVRKDKTESIFIFELPTYRLPDIRNVALGLYDRATIFLKRVGGIIVALSILLWVLVTFPQPPEHATMPAINYSLAGQLGHIIQPIFAPIGFTWEICIALIPAMAAREVVIAALGVIYAMSGDEDTVTQTLLSQISGPDGWGLATGMSLLVWYIFAPHCLATLATIRRETGSWKQPVIMATYLFGLAYFFAFITYQLISRL

SEQ ID NO: 5849 - DNA, 252 bp, Acinetobacter baumannii
atggttgaaaaaaacaatgtcgcaactttgcgagagcaagctggtatgacagtttatcaattagctaaacaatgcggatttatatcaaataatcatgtgcttaataggtatataaaagatgcagaagcaggaaaacacatcagtgtttatcgtgccttactcatttacaccgaactaaaaaaagctggtgtatgcgagaagtttgaagatgtcttttggcttgaatgtgatgataaagatatcgaaaactaa

SEQ ID NO: 5850 - protein, 83 aa, Acinetobacter baumannii
MVEKNNVATLREQAGMTVYQLAKQCGFISNNHVLNRYIKDAEAGKHISVYRALLIYTELKKAGVCEKFEDVFWLECDDKDIEN

SEQ ID NO: 5851 - DNA, 762 bp, Acinetobacter baumannii
atgtcaaagatgcgagaattacagagtagagcaggaaacccggacctaagtcattggaagaataataagctattttcaatcgctgaagcagcattattaacatgtgggattgacccattagatcataatcataattttgaaaataatttagttgcagatttacagtttaaaaatgttgtaaattggagacatgctattttgcttattagagcatttaaagaagggatttgcacacatgagataaaatcaccatgtgtcctattgaatagggaggattatcatggtaacggatatacggaatcaaaagagcaatcagctttaggcataagtgatattggagatatatgtatttttggaacaagaatacatcgagataatttacatatatggcttaattataatgactattttgagcctattcagtcacatactatcagtgctcaaaactctacatatccgtcacatgagccaatacaacttaatagcattgtctcactaccagcacctatttatagaactcccgcattagatgctgtacaaggggttgttaataaattttgggttagttatgaccctgatggcaatcaaccaccaccaaaacaaatccaagttacggagtggattaaagctaactacccagatattcaggctgcagatatttgtaaatatatagataaaatttgccgtcaccccgaagcaaaaaaaggcgggaacactaaagtaaatcaacaaattaaaatcaaaggggttactacaaaataa

SEQ ID NO: 5852 - protein, 253 aa, Acinetobacter baumannii
MSKMRELQSRAGNPDLSHWKNNKLFSIAEAALLTCGIDPLDHNHNFENNLVADLQFKNVVNWRHAILLIRAFKEGICTHEIKSPCVLLNREDYHGNGYTESKEQSALGISDIGDICIFGTRIHRDNLHIWLNYNDYFEPIQSHTISAQNSTYPSHEPIQLNSIVSLPAPIYRTPALDAVQGVVNKFWVSYDPDGNQPPPKQIQVTEWIKANYPDIQAADICKYIDKICRHPEAKKGGNTKVNQQIKIKGVTTK

SEQ ID NO: 5853 - DNA, 2769 bp, Acinetobacter baumannii
atgtcatatagaaactatacaacacgaatgtcttgttttgcactgattgccgccattgagtcagattttaggctaatcatatattttgaaacaagtgacaaaaaaattgaaagtgtattaccagaagatgtactctcaaatgctaagcatagatttaggtcagataaaccttcagaaaatcatgaggaggtaagcttatctgatttactagaatatgtagacttttacgatttaagtaaaattttaaataaagtaaaaaatgagcagaaattctttacgatagagcaactcactgttgtaacaagaaatttagaaaatttgacagctgctaggaatagagtttgccactcgcgaccattagaagctgatgattttacatctctttttgatttttcttgcgaattagaatcaataaataaaagtgataataattggcgcaatctaaaatatgctaaacaaaaccttaataatgcagattttattttaacaaatactattcctgatttttggaaaaatgagaaaaatcatattttacaaaatttacctttaactgaatttgatgatacatctttccttggaagaaaggatgatagaaaaaaaattacagatttaattctttctaatactagagtcattacaattataggtgagggagggatagggaaaacggctattgcacaacgttgtttatacgacatattggaaatctgtgaaaatcaaaaagaagaacaacgctcatttgatatgatcttgtgggtttcactaaaaacaaatcgtttaacgcaggctggggctattagtattaaggatgctattactaatagtagtgatatgtttaaaatcattcatgataattttgctaatagctcagatatgactattgatgatgttttgaaggaaattttagagtatatggatacttttaaaattcttctttgtattgataatttggaaactatttcctcagctagtgttcgaaattttttatcacagattcctaataaatcaaaggtcttgattactactagaatggggttaggtgaaattgagtatcgttataaactagataagttaaatgataaagactccatagatcttttgagaactatggcaaaaatattaaacttaacatctatagtaaaaaagaaggcagatacattaaagactttatcatcacaactttttaataatcctttgttaattaagtggtatgttcttaatgaagcttcgggtaataatatgagagaattttttaataaaaattcatcatcttttaaagaagccttaaaattctgttttgaaaacttatatgataatttgagtgattttgagttaaaaactatatcaacaatagcatgtttaaagaaaccagttagcaatgttgaattgaaatactatttagatgatttggatgagatacaattacaacaggcacttaatcaattatttaattcctctatgctagtttcctcttcagtagaggatagtaataaattatatagtcttacaggtattgctgaagaatatattgtatcattaagacctgtagataagagtttttatattcttattaaagaaaaacaaaagaaattacagaatttagtggaatcagagcgaaaagaaaaaaatcattacaaatatgatttaagtgttattcattctaataataaagatgaggcaatttgtgcactgtatcttaaacaagctctagctgcttttagagataaggaatttgattatgctggaactcttattgaaaaagcaaaagttattatgcccgattactcagaaatatatagggttaatggttatttgctaaaagatattaacccatttcaggcagaaacagagtttgaaacagggattgaaattaatgaaagagatcctcttataagatatgcttatgcacaattttttttggaacagggtgattcaagcaatgctcttgagcagattgaagcagctctaaagttagatcctaaagagattgctttaataaattataaagcttgggcattaaccatgagtggaaaatatattgaagcgattactatttatgaaaagttacttgaagatccatataatttaagtccgcacaagaaatttcgggctagtacctttgatcaggcaattggttgttatcgtcggtacgcagagcgtttaatgtatgataatgattgggatagtgttgaggagcagatactgaatgcactggttctagctaataaagctatttatacaaataatattgataatgggaatgttaaacaaatttttaaacttacccgggtaattgataagattcgtgacaagacaaaaaagactaatttattaaataaatttttagaggtagttgagagcaatgctattgattttaactatttaagtagaacttggtttagaaataatttatatgattttaaagattttatagaggccatattttttgaacgtttaaatgaccttttgcaggagactttaaactctgctaacttagcattgggagtgtgtaatgttggttatattcagaccttaaagtcgaatgaaagatatccaaatactgtttcgtttggttttattgatgctggaggggtgaacagatttttcttttcaaggaataatttaagagtaaaagactctttggatcattatattgataagaatctttcggaagatattttgattgaagtgagctttaatattggtagtaatgataaaggtaattttgctcaggatatcggcgtggttaatgttactgatttaaattaa

SEQ ID NO: 5854 - protein, 922 aa, Acinetobacter baumannii
MSYRNYTTRMSCFALIAAIESDFRLIIYFETSDKKIESVLPEDVLSNAKHRFRSDKPSENHEEVSLSDLLEYVDFYDLSKILNKVKNEQKFFTIEQLTVVTRNLENLTAARNRVCHSRPLEADDFTSLFDFSCELESINKSDNNWRNLKYAKQNLNNADFILTNTIPDFWKNEKNHILQNLPLTEFDDTSFLGRKDDRKKITDLILSNTRVITIIGEGGIGKTAIAQRCLYDILEICENQKEEQRSFDMILWVSLKTNRLTQAGAISIKDAITNSSDMFKIIHDNFANSSDMTIDDVLKEILEYMDTFKILLCIDNLETISSASVRNFLSQIPNKSKVLITTRMGLGEIEYRYKLDKLNDKDSIDLLRTMAKILNLTSIVKKKADTLKTLSSQLFNNPLLIKWYVLNEASGNNMREFFNKNSSSFKEALKFCFENLYDNLSDFELKTISTIACLKKPVSNVELKYYLDDLDEIQLQQALNQLFNSSMLVSSSVEDSNKLYSLTGIAEEYIVSLRPVDKSFYILIKEKQKKLQNLVESERKEKNHYKYDLSVIHSNNKDEAICALYLKQALAAFRDKEFDYAGTLIEKAKVIMPDYSEIYRVNGYLLKDINPFQAETEFETGIEINERDPLIRYAYAQFFLEQGDSSNALEQIEAALKLDPKEIALINYKAWALTMSGKYIEAITIYEKLLEDPYNLSPHKKFRASTFDQAIGCYRRYAERLMYDNDWDSVEEQILNALVLANKAIYTNNIDNGNVKQIFKLTRVIDKIRDKTKKTNLLNKFLEVVESNAIDFNYLSRTWFRNNLYDFKDFIEAIFFERLNDLLQETLNSANLALGVCNVGYIQTLKSNERYPNTVSFGFIDAGGVNRFFFSRNNLRVKDSLDHYIDKNLSEDILIEVSFNIGSNDKGNFAQDIGVVNVTDLN

SEQ ID NO: 5855 - DNA, 2412 bp, Acinetobacter baumannii
atgctaaataaaagtaaactatttttagctttaattactttaggggcctcgaaaattttattggcagctgaagggcctgttactaccttaaatacaatagtattaactgcacaatctgatgagttagggtctgagctgttaggcaaaagtctaaatgttagtaatcagtttattgatactagtaaacttaaacagcgttcgacaactctaggggatgccttgggtacggaattaggaattcattctaatcaatatggaggtggagcatctactcctattattcgtgggcaggaaggaaaacgtattaaagttttacagaataatgctgacgtgttggatatgtctaatatgtctccagatcacgctgtcacagttgaaccaagtttagctaagtctattgaaattatacgtggtgcaagtacccttttgtatagttcaaatagtgcggcaggggtagtcaatgtcattgactataaaattccaacccaaatgcctcaagacggattagagggtaatactacattacgttttaatactggcagtaatgagaagttgaccacagcaggtgtaacagttggcttaagcccacatgtagctttacgggcagaagggttatatcgtaatgctggtaactataaaactcctcattaccagtctagctcttataattctttagaagatcttgaaaaccaaaacagtatttataaaaatttaaaatatttaccagaaagctgggcagagtcgagagtaggtacgcttggattatcctggatagacgataatacttatttaggagtttcttatacacatcgtcatgatgaatatggtttaccagcccatagccatttatatgaaggttgtggtgcctctgcaatcggtatcgattcacgaattagtggattaaaaaattatcttttatattatcctcaattgatggatgagcaagatattaattacataaatccacgtcctgattgtcatcagcataatcatattcatgaaactaatttctctcataatgctccttatattgatttaaatactcgacgttatgatgtgcgtggagaattcactcaaccatttaccggtattgacaaaattcgtacctcattgagttatatagattattttcacaatgaactcgagggagataagattactaacttttttaaaaatacaggaaaagtaggccgcatagagttatcacatcagccattaggggaattaaccggtatcttggggctacaatatttggaacaggataatagtgctttatcaccagtccattctcaagaaggccataccacctatctagataatcagcagctattaaatcgaaatgtcactaaaaactttagtgtatttggcctagaaaaatataactggaacgactttactttcgaactaggtgctcgtatagaaaagcagaaagttagtatggattatgatatagaaaaaattaaagattcaatgaaaccttggcctaataaatataacagtccttatgtagaaaaaaataataaaatcagggctcaaaatttaaaatctattttagaagctgttcaacctaacaaagaaacagctttttcttatgcaggtacagtccactggagatttgctccaaattatatcttatcattaacaggtacacatcaagaaagattacctaatgcacaagaaatgtatactcatggtatgcatctcgctactaattcttttgaaataggtaaccgctttctaagaaaagagaaatccaataatttagaaatcagtctggcctataaggatgatttacttgattatcaaatcagtacttactattatgattttgataactatatatatttacagacactcaatgaagttttaggaactacaaaagttagagatcagcatacactacgtattaatcattatagccagtctgctgctaatttttatggattagagggcaacatagggtatcaatttaattctgtttatcacggctctctttttggagattatgtgaaaggccgtttaacaaatttacctgatgctgtaattgcatacgatatctggaatagagaaccgactttagctccccaaaaggatcgttacactcctagattacctcctgctcgtttgggtacacgactaaaagctgattttgatgaatcgcttaaaggtgaaatagaatattatcgagtctttaaacaagataatatttctaaatttgagcaggttacatcaggttataatatgcttaatatgactttagcatataaaaataagctatctcacacagaatatgatttattctttaaagcgaataatttacttgatcagaaagtctatgcccatgaaacatttttgccatatattccccaaattggaagaaattttagtttaggcttaaatcttaatttctag

SEQ ID NO: 5856 - protein, 803 aa, Acinetobacter baumannii
MLNKSKLFLALITLGASKILLAAEGPVTTLNTIVLTAQSDELGSELLGKSLNVSNQFIDTSKLKQRSTTLGDALGTELGIHSNQYGGGASTPIIRGQEGKRIKVLQNNADVLDMSNMSPDHAVTVEPSLAKSIEIIRGASTLLYSSNSAAGVVNVIDYKIPTQMPQDGLEGNTTLRFNTGSNEKLTTAGVTVGLSPHVALRAEGLYRNAGNYKTPHYQSSSYNSLEDLENQNSIYKNLKYLPESWAESRVGTLGLSWIDDNTYLGVSYTHRHDEYGLPAHSHLYEGCGASAIGIDSRISGLKNYLLYYPQLMDEQDINYINPRPDCHQHNHIHETNFSHNAPYIDLNTRRYDVRGEFTQPFTGIDKIRTSLSYIDYFHNELEGDKITNFFKNTGKVGRIELSHQPLGELTGILGLQYLEQDNSALSPVHSQEGHTTYLDNQQLLNRNVTKNFSVFGLEKYNWNDFTFELGARIEKQKVSMDYDIEKIKDSMKPWPNKYNSPYVEKNNKIRAQNLKSILEAVQPNKETAFSYAGTVHWRFAPNYILSLTGTHQERLPNAQEMYTHGMHLATNSFEIGNRFLRKEKSNNLEISLAYKDDLLDYQISTYYYDFDNYIYLQTLNEVLGTTKVRDQHTLRINHYSQSAANFYGLEGNIGYQFNSVYHGSLFGDYVKGRLTNLPDAVIAYDIWNREPTLAPQKDRYTPRLPPARLGTRLKADFDESLKGEIEYYRVFKQDNISKFEQVTSGYNMLNMTLAYKNKLSHTEYDLFFKANNLLDQKVYAHETFLPYIPQIGRNFSLGLNLNF

SEQ ID NO: 5857 - DNA, 555 bp, Acinetobacter baumannii
atgaacgctaaagtacaaattcaattacaagagcaattagtccctttctataatgctactaattatttaaatgcttataaaattgcatatgaaacggctactcaacttcgcactctactcaatcaaattagtaagtctgcaatcttcgttaaaacctatgctgaagagcataatttagataattcaatcttcatagaggttgaaaatttaatcgcaatctcgcttcaactttccaactcttatgctgatacatgtaacgctgtgattaaaagacatcgtaaagcaccacatgatcaatacgacgctggtgatctaaatgaagcttacgcacttgctcatgaatatacgacctggttagaaactttaatttctaaaattagaatagaagttaagttggttaaagaagcagtaaaagatgtcattcacagctctgtctttgcgacacttgaaagtttaattaatattgctgagtactttgctgaaatcaatgttaatactttttctattgaaagtgaaaagtatgaagctgaatttgaggtatctaaaaatggataa

SEQ ID NO: 5858 - protein, 184 aa, Acinetobacter baumannii
MNAKVQIQLQEQLVPFYNATNYLNAYKIAYETATQLRTLLNQISKSAIFVKTYAEEHNLDNSIFIEVENLIAISLQLSNSYADTCNAVIKRHRKAPHDQYDAGDLNEAYALAHEYTTWLETLISKIRIEVKLVKEAVKDVIHSSVFATLESLINIAEYFAEINVNTFSIESEKYEAEFEVSKNG

SEQ ID NO: 5859 - DNA, 309 bp, Acinetobacter baumannii
atgaaaaaaacaaatgtccatatcttcatttggaaatttgtaattggattattcttttttagttttcttatgacttatgttcactcaaatgctgaaattacaaatttatcaatgttgttttatgggtttaaggtaggtctgtggtttgcaactattgctaccactttgatttgtgtattgctcggtttagcaaagctcttaaacaataaacctgagaaaaatgagcttatttactcatggttttatacatcgacaaaatatacgctagtgtttgtttgcacattagctgttgctatttttgtcgcatag

SEQ ID NO: 5860 - protein, 102 aa, Acinetobacter baumannii
MKKTNVHIFIWKFVIGLFFFSFLMTYVHSNAEITNLSMLFYGFKVGLWFATIATTLICVLLGLAKLLNNKPEKNELIYSWFYTSTKYTLVFVCTLAVAIFVA

SEQ ID NO: 5861 - DNA, 198 bp, Enterobacter cloacae
atgtatatgcaggcagccctggatcatctccgggcgcaaggtgaaacactgaatgatgaagatatcgcacgcctctccccgctttgccacggacatatcaatatgctcggccattattccttcacgctggcagaactggtgaccaaaggacatctgagaccattaaaagaggcgtcagaggtagaaaacgttgcttaa

SEQ ID NO: 5862 - protein, 65 aa, Enterobacter cloacae
MYMQAALDHLRAQGETLNDEDIARLSPLCHGHINMLGHYSFTLAELVTKGHLRPLKEASEVENVA

SEQ ID NO: 5863 - DNA, 222 bp, Enterobacter cloacae
atgagtaagaaaaacgacggtggctacgctttccctatggaggcgacagatgccacagcttggagggattgcaatcagggaatgacgttgcgcgactacttcgcggccaaggctatgcagggtcgattagcgaatcctgactggttgtgtagccatgaccgcacggcaaccgaagcataccacatagctgacgccatgctccgcgcccgggagacatcatga

SEQ ID NO: 5864 - protein, 73 aa, Enterobacter cloacae
MSKKNDGGYAFPMEATDATAWRDCNQGMTLRDYFAAKAMQGRLANPDWLCSHDRTATEAYHIADAMLRARETS

SEQ ID NO: 5865 - DNA, 435 bp, Enterobacter cloacae
atggctaaagacggaaagcatattatccacgccggcggcgtgttccctaatccgctgcttaaccgcgaaggcggggcggccgcatcgactctgcctggtactgttggcttcttcagtactgctgacaagttcacggcctctgtggtcggggcagaatccgccatcaagtatgtggcaaacaaagactacctgcgctgcctgagtgttgatgacgcaatcccagccaatgaattggttgttggtattcatccgctgcctggcatgttcctaaatgtgcgagcagcagcgggcacttacaccaaaggccagccggttgcagtagccaacggtcagatcactgcggttgtagatgatgccgccgtattcgcttatgtcgaagaagataaagcagtcactgcggtggcgggcgatctgattcgcgttgtgttcaaataa

SEQ ID NO: 5866 - protein, 144 aa, Enterobacter cloacae
MAKDGKHIIHAGGVFPNPLLNREGGAAASTLPGTVGFFSTADKFTASVVGAESAIKYVANKDYLRCLSVDDAIPANELVVGIHPLPGMFLNVRAAAGTYTKGQPVAVANGQITAVVDDAAVFAYVEEDKAVTAVAGDLIRVVFK

SEQ ID NO: 5867 - DNA, 531 bp, Citrobacter freundii
atgcactatccaaccgtatctgtaaacggagtttccgttcgcgttgatgacgaagggcgctacaacctcaatgatcttcacgctgccgcagtggcaaacggagaggcaacagaacagcagcgcccaagtcagtttttgcgtagtgctcaagttaagcgcttcataaaagcactaaaagccaaagtgcaaaaaagcactctggaacaaattcaaccacttaatgttattaaaggtggggatgaaccaggcgtttggggtgttgaactgttggcgatccgttatgccgcatggattaagccggaatttgagattgaagtatatgaggtgttccgaacggtggttcgcctcggcatcagtgccatgtcccgcctgaacaaaattgaccacatcatcaatactgaaaccaagcagatcagccaatgcgccagccagatggccagatggggttccggcggccgcaagcaactactgaacgcagcgcgtgatcgcgttgctgatgaggtgcaaatgtatttgccgggtatttactga

SEQ ID NO: 5868 - protein, 176 aa, Citrobacter freundii
MHYPTVSVNGVSVRVDDEGRYNLNDLHAAAVANGEATEQQRPSQFLRSAQVKRFIKALKAKVQKSTLEQIQPLNVIKGGDEPGVWGVELLAIRYAAWIKPEFEIEVYEVFRTVVRLGISAMSRLNKIDHIINTETKQISQCASQMARWGSGGRKQLLNAARDRVADEVQMYLPGIY

SEQ ID NO: 5869 - DNA, 708 bp, Enterobacter cloacae
atgaacgcgatgtttaaaaaaggaatgctggcgtccgcgctggctgtcgtggcgtcctctgctctggcagcttccagtgttgatattcaggtgacgggtaaaatcgtcccctcttcctgtacgcctacatttattagcggtggtggtattgccgattatggcacgataagtgcgtcttcactgaattccacttcggctacaccattggcggatgttaaaattattcctgtttccattacctgtgaagaggccacccgcattgcagtaacgtttaatgatgcccatgcagactcaggaccaactcaagttttgccgaccagttttattgatacggaatttgggagagaggcgtaccaaaccgccgggctgggtatgtacaatggtaagaaaattggtgcctactcattagggattcagcttacgaaaggcgctgtcacgaacgacgcaggcgatgaactgtatcctactgcatcgcgcgataacggaacaacgtgggcaacaacaggcggacagcgctatttaaaagtaaacacagacaaaagcgaattatattccttcagtgacacattgggcggcacgcctgtcgcacaaaccaaggttaactttaatgtgggtgtcgccgcgatgattaacccaaccgatgatttaaatatcacggatgaagccaccctggacggcttaaccaacgttgagctggtttatctgtaa

SEQ ID NO: 5870 - protein, 235 aa, Enterobacter cloacae
MNAMFKKGMLASALAVVASSALAASSVDIQVTGKIVPSSCTPTFISGGGIADYGTISASSLNSTSATPLADVKIIPVSITCEEATRIAVTFNDAHADSGPTQVLPTSFIDTEFGREAYQTAGLGMYNGKKIGAYSLGIQLTKGAVTNDAGDELYPTASRDNGTTWATTGGQRYLKVNTDKSELYSFSDTLGGTPVAQTKVNFNVGVAAMINPTDDLNITDEATLDGLTNVELVYL

SEQ ID NO: 5871 - DNA, 480 bp, Enterobacter cloacae
ttgaacagaatgacaggactcgctgttttatgcctctcgctgatgggatgcagtgccgtgccatcagaaaacagtgcgcagtacctcagaacggaaatgcagtcgccagtatcaggggcaaccataattaccgtaactgcggacagccttatgaaacaagacaatacacataatgctatactgtatgcacttcgaccgatgcctggaaaagcattcacctctgagctggacagaaaatttgccgcagcgacgatgtatattgatttgtctccgggtgaaaaaagcagaacggccgagatcagtggtgagataaattactatgatcacgagcgatacgtgaatgctcgcctggtaggagacagtatcaggacaatacctattgcaccaaagaccatcccacttacactgaataagccattctcaatcaatctgccacaaggtattcactattcagtcatgctgacggacagccagccttaa

SEQ ID NO: 5872 - protein, 159 aa, Enterobacter cloacae
MNRMTGLAVLCLSLMGCSAVPSENSAQYLRTEMQSPVSGATIITVTADSLMKQDNTHNAILYALRPMPGKAFTSELDRKFAAATMYIDLSPGEKSRTAEISGEINYYDHERYVNARLVGDSIRTIPIAPKTIPLTLNKPFSINLPQGIHYSVMLTDSQP

SEQ ID NO: 5873 - DNA, 264 bp, Enterobacter cloacae
atgaaaattcaaaaagataaattagttctgatactaaaaggattagcagaagtttatccttactacccttcttccgagtacatgcaagggctggcaaacgatgttggcagtgaaaacgagttcgatgggcacatgctctatttgtctgataaagggttgattatcacggatatgaaatgggactacttagaaggtagttactggttttcaccagataagacacgtatcagttgccaaggtttagactaccttgcagagcaatag

SEQ ID NO: 5874 - protein, 87 aa, Enterobacter cloacae
MKIQKDKLVLILKGLAEVYPYYPSSEYMQGLANDVGSENEFDGHMLYLSDKGLIITDMKWDYLEGSYWFSPDKTRISCQGLDYLAEQ

SEQ ID NO: 5875 - DNA, 909 bp, Shigella boydii
atgaaagcacctgtttcattaacctcatttcgcccacaaaaatctcttgctatcgccattggcgtgcttgccgtggttgtgctgccatttctctcgtattacaccgttaatgaaggtgaacgcggcattttgctgcgctacggaaaaatcgtaaaagttgccgagccggggctgggttttaagatcccttttatggaaagcgtagagaaaatttccacgcgtaatcaggctgtggtctatcagggattacaggcctacagccgcgaccagcaaccggcacaaatgacagtatcagtcagcttccacattaaaccttcagaagcaggcgcggtttataccacctacaataccattgaagcattaaaagatcgtctgattgtccgtcagttgccaactcaactggagaacgttttcggacaatataccgccatcagcgccgtacaggatcgcacaaaactggttcaggatctgcaaaatgccatgcgcaaagccgttgttgggccagtggtaattgacggggtccagattgaaaatattgatttttctgacgcttatgaaaagtcgattgaagaccgaatgaaagcagaagtcgccattgccacgcgtaagcaaaatctggaaacggagaaaatccaggcgcaaatagcggtaactcaggcccaggcggaagcagacagtaaactagcggcagccaaagcagaagcggaaactattcgcgtaagaggcgcggcagaggctgaaactattcgtttaaaaagtgcggctgaagcagaagctatccgcctgcgcggtgaagctctgcgggagaatcccggacttgttgccctcaccactgctgagcgttgggacggtaaactgcccgataccatgatccccggcagcacagttccgtttatctctactaagtaa

SEQ ID NO: 5876 - protein, 302 aa, Shigella boydii
MKAPVSLTSFRPQKSLAIAIGVLAVVVLPFLSYYTVNEGERGILLRYGKIVKVAEPGLGFKIPFMESVEKISTRNQAVVYQGLQAYSRDQQPAQMTVSVSFHIKPSEAGAVYTTYNTIEALKDRLIVRQLPTQLENVFGQYTAISAVQDRTKLVQDLQNAMRKAVVGPVVIDGVQIENIDFSDAYEKSIEDRMKAEVAIATRKQNLETEKIQAQIAVTQAQAEADSKLAAAKAEAETIRVRGAAEAETIRLKSAAEAEAIRLRGEALRENPGLVALTTAERWDGKLPDTMIPGSTVPFISTK

SEQ ID NO: 5877 - DNA, 783 bp, Escherichia coli
ttgccaaactatctaaactggttgatgcaaaacacgctacccggtcaggtgctgctccagtcatggcttacccgcaatggcgtagatcgtaagctttcttatctctatgttcagaatggctggctcaggcgcatcgctcacggtgtgtactgccggacgggccgtgagccggattgggtagacgcggtttactgccttcaaacacagtgggaaaagcctgttcgggtggcggggctaaccagccttgcgcttcagggccatgcgcactataccgaaccgggtaagccgcaggtctggctcgcgcttccggcttacgtcaaactgccgggatggtttgctgccttcgaacaatcagcaacatttatcacgctgtatacatcgggccttaccgttgatgtctcgtcatttactacggaactgaaaattggcgaccggcagttagcaggcagtgcaccggaactggccgcgtatgagatcgcctgcggcgttccttcgttgatctcgttcgaacatgccgatgctctgtttcagggggggaatcttctcagcccacgcaaattgcaggcactgcttcgcgccagtcattcgattaaaaccaaccgggtgatgctttaccttgcccggcgtaatggacacccttattttcagtatcttgatcaaagcggtatagaaacaggtacgggaaagcggcaaatcatacctggtggctggctggagccggattatcaaattactgttccccgcacatttaaaccggaaggagtcgaagatggatctgcgtga

SEQ ID NO: 5878 - protein, 260 aa, Escherichia coli
MPNYLNWLMQNTLPGQVLLQSWLTRNGVDRKLSYLYVQNGWLRRIAHGVYCRTGREPDWVDAVYCLQTQWEKPVRVAGLTSLALQGHAHYTEPGKPQVWLALPAYVKLPGWFAAFEQSATFITLYTSGLTVDVSSFTTELKIGDRQLAGSAPELAAYEIACGVPSLISFEHADALFQGGNLLSPRKLQALLRASHSIKTNRVMLYLARRNGHPYFQYLDQSGIETGTGKRQIIPGGWLEPDYQITVPRTFKPEGVEDGSA

SEQ ID NO: 5879 - DNA, 147 bp, Citrobacter koseri
atgaaaaatggccttgaactgaaagcgcctgtaactgatgacatcagcagagcactggcttttgccattaagtgggtggcggtcggtgttgctgtgtccccgatgctgtatgggctggcaaaactggtcattgcgttgaaatcgtga

SEQ ID NO: 5880 - protein, 48 aa, Citrobacter koseri
MKNGLELKAPVTDDISRALAFAIKWVAVGVAVSPMLYGLAKLVIALKS

SEQ ID NO: 5881 - DNA, 267 bp, Citrobacter koseri
atgaatattaatattgaatacctgaatggaaataagactattggtttattttttttaagaagtgaagcggtgattcctgacaggtttaaaaaccttattttgcttattgatggattaagttttggcacatttggttttcatccgcacgaaggttttgaggatgaattaattttatatattcagaaaacaaacgagagggtaaaaactctttttgtgaaaatagatttaaacggtatcaagtttggatttttaagaacgcattcttag

SEQ ID NO: 5882 - protein, 88 aa, Citrobacter koseri
MNINIEYLNGNKTIGLFFLRSEAVIPDRFKNLILLIDGLSFGTFGFHPHEGFEDELILYIQKTNERVKTLFVKIDLNGIKFGFLRTHS

SEQ ID NO: 5883 - DNA, 273 bp, Escherichia coli
atgaagatgatgagaatgtactgccccacatgtcaggcagtagcacggataggtaaaacaaacaggaaacacccacaactgtacgatgtgtactgctattgctctaatgtggagtgcggtcactcgtttgtgatgaatgttgctttctcccattccgttagtccaagcgcgctgaacgggcagggaagggttaaagagctgattgatgcaattccacccgaggaacgggaaaaggctttaaagttgctgctggctgcgcaaaagaatgggtaa

SEQ ID NO: 5884 - protein, 90 aa, Escherichia coli
MKMMRMYCPTCQAVARIGKTNRKHPQLYDVYCYCSNVECGHSFVMNVAFSHSVSPSALNGQGRVKELIDAIPPEEREKALKLLLAAQKNG

SEQ ID NO: 5885 - DNA, 396 bp, Shigella boydii
atgaaatgtccggtttgccaccagggagaaatggtttctggcattaaagatattccatacaccttccgtggacgaaaaacagtattgaaaggtatccacggtttatattgtgtccattgcgaagagagcatcatgaataaagaagagtcagatgctttcatggcgcaagtaaaggcatttcgggcttcggtgaatgccgaaacagtggcacctgaatttatagtgaaggttcgaaaaaagctctctcttacccaaaaagaggcaagcgaaatttttgggggaggtgtaaatgcgttttcgcgttacgaaaaaggcaatgcccaacctcatccttccacaatcaaacttttacgtgttctggataagcatccagaactattgaatgaaatccgttaa

SEQ ID NO: 5886 - protein, 131 aa, Shigella boydii
MKCPVCHQGEMVSGIKDIPYTFRGRKTVLKGIHGLYCVHCEESIMNKEESDAFMAQVKAFRASVNAETVAPEFIVKVRKKLSLTQKEASEIFGGGVNAFSRYEKGNAQPHPSTIKLLRVLDKHPELLNEIR

SEQ ID NO: 5887 - DNA, 486 bp, Shigella sonnei
gtgactggacatgcagcaatcctagacatgtgctgtggcagtcgcatgttctggttcgataagaatgacgaccgggcgatatttagcgatatcagaaaggaagagcacacattgtgtgatggacgacgcctgattatcagtcctgacctgatagctgattttcgtgcactaccatttgcagacgcatccttttcgatggttgtattcgaccctccgcatcttgagcgtgttggtgataacgcttggatgggaaagaaatatggacggctgaataaagatacctggcgtgatgatttacggcagggattcaaagaagcctttcgtgtgttgtggccatacggcgttctgatttttaaatggaatgaaacgcaaatacctgttcgccagatattggcactgaccgacagaaagcctgttatcggtcaacgaacaggaaagggtgacaagacccactggattatttttatgaaggagggcaaccagtga

SEQ ID NO: 5888 - protein, 161 aa, Shigella sonnei
MTGHAAILDMCCGSRMFWFDKNDDRAIFSDIRKEEHTLCDGRRLIISPDLIADFRALPFADASFSMVVFDPPHLERVGDNAWMGKKYGRLNKDTWRDDLRQGFKEAFRVLWPYGVLIFKWNETQIPVRQILALTDRKPVIGQRTGKGDKTHWIIFMKEGNQ

SEQ ID NO: 5889 - DNA, 285 bp, Klebsiella aerogenes
atgagccatgctatcgatgcacatctcactgacgaagtgataaacgccgcattcgaaaacactaatttcgggcgagatgactttcgcaccattctggcggaaaccgttatgaagctagccgccggttatcactctggctggacggcgacgaccatttgcactcgcctcaaactgctgggtaaacaggagcggccaacaaagctcggtctgacgttcgcctttcaccactactaccggcagagcgtccgcgatgcgctgatgccaaaacaggagccttcagcatga

SEQ ID NO: 5890 - protein, 94 aa, Klebsiella aerogenes
MSHAIDAHLTDEVINAAFENTNFGRDDFRTILAETVMKLAAGYHSGWTATTICTRLKLLGKQERPTKLGLTFAFHHYYRQSVRDALMPKQEPSA

SEQ ID NO: 5891 - DNA, 858 bp, Klebsiella aerogenes
atgcaaattcgtgactacatgacaaagttgtttgacgcatttggtgatgtggaggaagtcacccgagaaatgcttctggagcaggcggagctcattcatacgatcagcgataagtgtcagagcacaggcctgtttctggatagtcaggttcgtttcaaccagttcgttcaagagattgaggctgacgacaaggtagaggatcggttgcttcatgcttggtgctgggtaatggaccgaatagtgaaggctccaacatcctttcacatggatggggctgtgattttgacaatgcctctggtcgccagatacctgccaccggttgaacaggagccggaaaccatcgtggtgaatctcgatgaggactacaaggctcctgtaggcaaccaaacgctctgcgagctcgttatggaacggaggcattggccgcaaggtgcaacctgtgcgacccaagaagcggacgggggagtcctctactgggacgccccggttgatgtggtagaggaaggcagaaaggtcgccggtaagcacggcatgatggccgagatcggattgaaacatcaggttgatgcctggtatgcagatatggacgaaacacggctcgcaaccgattggaacaccgccgtcattacgcctcactgcttgctgctttcctatctggatgtgcttcaaaagaacaaagttccctttgatgaaggtgtgcagctcgctgccgaatgggtgaagcaacttggcggggaatttcgtgaagacactgaggaagcgccggaagctgaggcttcagtgctttccctggggagagccacggctcattgctttaaaccctatccggacacaaaaaatttctattacgaggcctaa

SEQ ID NO: 5892 - protein, 285 aa, Klebsiella aerogenes
MQIRDYMTKLFDAFGDVEEVTREMLLEQAELIHTISDKCQSTGLFLDSQVRFNQFVQEIEADDKVEDRLLHAWCWVMDRIVKAPTSFHMDGAVILTMPLVARYLPPVEQEPETIVVNLDEDYKAPVGNQTLCELVMERRHWPQGATCATQEADGGVLYWDAPVDVVEEGRKVAGKHGMMAEIGLKHQVDAWYADMDETRLATDWNTAVITPHCLLLSYLDVLQKNKVPFDEGVQLAAEWVKQLGGEFREDTEEAPEAEASVLSLGRATAHCFKPYPDTKNFYYEA

SEQ ID NO: 5893 - DNA, 2988 bp, Klebsiella aerogenes
atgagatcgagaccttcccttttactgatgcgaaacctgcggtcattggccgttgtggtgctcgcaactttgccatgcgttgcttttgcacaatggcgggttgtagccgtgagcaccgaagtagacaaaatgcgcttcaacaccatcatagacgcgcattccttcatgaagaattatcgctctggtgaggagcaagggaagggaacgccagttggggatgcgctttatccggttgccagttatggtgatggccgttatgtctccaggatctgttttaagtatctaggtgctactggcgattatgaccccactacctgcactggcgacccagctacggtctactggcgctcaacctatgttctgccgggtgagatggataaaacaccgttcctggacagggatctcggcttaccaacaacgaccatgtgtgtagggaaccctatccatcttggcaccggcaacaagttccaggctgaactggattatcaaagcggaggctccgaccctttcacattcaccagatactacaatagccaccttcctgatgaagagctcggcggctggcggcatacctactcgcggagcgtcgaggtcaacgcctcgaagtacggtgagaacatggttgtcctgcaccggccagaagggcaacaactcgcgttctacaactcgtcctctgtctgggtgccaacatggaaaaccgatgataccttgacgaaggatgctaccggctggcgttacactcaatctgacggggtagtcgaggcctatgatgaaaccggacgactgaccggcatcgagaagcccaacggcaatcacatcaccctgagctatctgaacggagagctatcctcgatcactgacggctttggccgcaacatccagttccagcatcaagatggccgcatggtcagtgtcaccgatcctgctggtggcagtattcagtaccagtacaacagcgctggcaagctggcggaagtgatctaccaggacaatacgagccgcagctatctctacgatgacccgaatgcaccgggtttgctctctgggctggtggacgagaacggcaaccgtttcgccacatggggatatgatgctcaggggatggcagttctaagtgaacacgccgggggcgcagagaagactcaggtaagctacaacgctgacggaagcgtctctgtcaccaacgccctcggccacgttcagcgatatacctacagccgtcacaacgggatgctcaagcctgatgttgttgagggtgcgccgtgtaccggctttgtgggaggcaaggaaacctacgtctacgacagcaaaggcctcgtctccagcattacagatcgtgctggacagaagcgcacgttcacccataacgaccggggattggaaaccacccagatagaccaggatgggggcaaggttacgaccgactggcttccttccaagtcgctccctgcaaaaatcacggaaccaaccaggatcactgagcttacctacgacactcatctccgggtgataagccgcaaggtcacagatcgcagctcgggcgcttcccggacatggacctacacctatgcccctgttggtacaggaaagccgagcctgttggcctcggttgatggtccgcgcaccgacgtcagcgatgttacgacatttgactacgatgaccagggcaacctgatccggacaacaaacgcgctggggcaggtgatgcagtttggtgactacgacgcgaacggtcgcgccgggaccattcagggcgtcaacggtgtaacccaaaccctcacctatgacgccagaggaagacttgtcagctccactggaccagaaggaaccacggcctacaactatgatgctgtgggcctcctgagctcgctgactaagccaaatggtgcaaccgtcagctatgagtacgacgctgcacatcggctggtggcggaaacagatgcacagggcaaccggcgcgagcttgagctcaatgacctcgggaacccagtagaagagcgactgctcgatgcgctgggccagacccgttggatagagcgccggatcttcaacgaaatcggctggctctccagtgtctccgacgcctatagcaatcagtcatcgttttcctacgatgtggtggcaaacctgatacaggagaccagtccctctggtaacacacactcctacaagtacgacggcttccatcaccggacacaaacgaccgatccactcgggaaggtcacgcaggtgctctacaaggataccggcgatgtttaccgtgtctccgaccctcgttcgcgcctgacctactacagctacaacggctttggcgaagtgactcaggtccggagcccggacaccggcaccaccgacattacctatgacgaagccggtaacgtggcaacgcgcaagacggccaagggacaaaccacaagctacagctacgacgcgctgaaccggatcatcgaggcatccagcggtgtcgctggcgaatcgccaattctgtacgggtacgacgaagcaacctcaccatacggcatgggccgcttgacctcagtcgatgatggcaacggtgtccggagatatggctatacacccgaaggatggttggcttacgagacctgggaaacccacgggcagagccttactacccagtaccaatacgatggtgcaggcctcatcacgaagatcacgtatcccagtggtcgtgaggtttcctacacccgtgatttagccggtgacgtcatcgaggtggcaacgacacaagcaggcaccacaacaagcctggcaagccagatcgagcgagcgccctttggccccgtcaccagtatggtcagatggaacggcatttcagaaagtcgctctttggatctcaattaccgagtcaccggcatcgacgctactagagtgcattcgctggtctatcggtacacgccagactcgttgatttcagccatagacgacaatctggggtcgtctcagaaaacggaaaataaagcacgctaa

SEQ ID NO: 5894 - protein, 995 aa, Klebsiella aerogenes
MRSRPSLLLMRNLRSLAVVVLATLPCVAFAQWRVVAVSTEVDKMRFNTIIDAHSFMKNYRSGEEQGKGTPVGDALYPVASYGDGRYVSRICFKYLGATGDYDPTTCTGDPATVYWRSTYVLPGEMDKTPFLDRDLGLPTTTMCVGNPIHLGTGNKFQAELDYQSGGSDPFTFTRYYNSHLPDEELGGWRHTYSRSVEVNASKYGENMVVLHRPEGQQLAFYNSSSVWVPTWKTDDTLTKDATGWRYTQSDGVVEAYDETGRLTGIEKPNGNHITLSYLNGELSSITDGFGRNIQFQHQDGRMVSVTDPAGGSIQYQYNSAGKLAEVIYQDNTSRSYLYDDPNAPGLLSGLVDENGNRFATWGYDAQGMAVLSEHAGGAEKTQVSYNADGSVSVTNALGHVQRYTYSRHNGMLKPDVVEGAPCTGFVGGKETYVYDSKGLVSSITDRAGQKRTFTHNDRGLETTQIDQDGGKVTTDWLPSKSLPAKITEPTRITELTYDTHLRVISRKVTDRSSGASRTWTYTYAPVGTGKPSLLASVDGPRTDVSDVTTFDYDDQGNLIRTTNALGQVMQFGDYDANGRAGTIQGVNGVTQTLTYDARGRLVSSTGPEGTTAYNYDAVGLLSSLTKPNGATVSYEYDAAHRLVAETDAQGNRRELELNDLGNPVEERLLDALGQTRWIERRIFNEIGWLSSVSDAYSNQSSFSYDVVANLIQETSPSGNTHSYKYDGFHHRTQTTDPLGKVTQVLYKDTGDVYRVSDPRSRLTYYSYNGFGEVTQVRSPDTGTTDITYDEAGNVATRKTAKGQTTSYSYDALNRIIEASSGVAGESPILYGYDEATSPYGMGRLTSVDDGNGVRRYGYTPEGWLAYETWETHGQSLTTQYQYDGAGLITKITYPSGREVSYTRDLAGDVIEVATTQAGTTTSLASQIERAPFGPVTSMVRWNGISESRSLDLNYRVTGIDATRVHSLVYRYTPDSLISAIDDNLGSSQKTENKAR

SEQ ID NO: 5895 - DNA, 423 bp, Klebsiella oxytoca
atgaagatgaaaaataacctctccggcctgcttctgctggcagcctctttcgccggccattccgccacggtgggcgagctggaaagtgttcaggaaaacaacctgctgctggaagcgcgcctgaaaggtgcacgtatgctggcggaaatggcaaaacacaatgagccggctcagccgctctctgttctgccccggggcgccacgcccgcctctccgtccgcccctgtcagcatgctgaccggtattcacgggaaagggggtgtgctgacggcagagctgcagcgcaacgggctgactcatgagttacgtaacggcaatccgtggccggggagccgtctcacggtaaaaagtatcaccctgaaaggcgtcacactgagtgacggcactgtgattgttcccggtcaggagatccatcatgaatga

SEQ ID NO: 5896 - protein, 140 aa, Klebsiella oxytoca
MKMKNNLSGLLLLAASFAGHSATVGELESVQENNLLLEARLKGARMLAEMAKHNEPAQPLSVLPRGATPASPSAPVSMLTGIHGKGGVLTAELQRNGLTHELRNGNPWPGSRLTVKSITLKGVTLSDGTVIVPGQEIHHE

SEQ ID NO: 5897 - DNA, 645 bp, Klebsiella oxytoca
atggtcttacatgggaaagttatcaagttattaattactattttgatggtggggttgtcatccgctgcttatagtaaagattatcaggcagggaaaaacttcactgttattcattctactgttaagcaaccgccgccactggttgagtttttttccttctactgcggaccttgttatgcgtttgcagagcgcatcaatgttgatacagctatcagaaagcgcctgcccgacgatatgaaactggaaaaataccatgtcagccagatggggcctttaggaccagcattaacagaagcatgggccgtagcacaatatgctggggtagatggcaaggtggaaaagttattgtttgagggtttacaggttaagcgtgatattaaaacggcagctgatattgttatggtgtttaatcaacttggcattacgtcagagaaatatgccgaaatgcaaagtaactttatggtaaaagctttaattgccagacaggataatctggtcgaaaaaatgaaagtgcatggtacgccttctttttatgtttcaggaaaatatcatattaacaatacatcactcgcgcaagatgactatgatacctatgcagaggatatggctaatctggttttatttttgcttaacaagcccctgtaa

SEQ ID NO: 5898 - protein, 214 aa, Klebsiella oxytoca
MVLHGKVIKLLITILMVGLSSAAYSKDYQAGKNFTVIHSTVKQPPPLVEFFSFYCGPCYAFAERINVDTAIRKRLPDDMKLEKYHVSQMGPLGPALTEAWAVAQYAGVDGKVEKLLFEGLQVKRDIKTAADIVMVFNQLGITSEKYAEMQSNFMVKALIARQDNLVEKMKVHGTPSFYVSGKYHINNTSLAQDDYDTYAEDMANLVLFLLNKPL

SEQ ID NO: 5899 - DNA, 210 bp, Klebsiella pneumoniae
atggagatcattactcgcgtcgaagcggcaaaggcaggactaaagcgctactacaccggtaagcaatgtaagcacggccatgacagtgagcgatgggtatacaacgggcattgtgtcgaatgcaccctcgagactaaccgccgccgccatgctgagataaaacggctaatgcatgaggcctcaaaaggtaatgccgtggaggtgatctga

SEQ ID NO: 5900 - protein, 69 aa, Klebsiella pneumoniae
MEIITRVEAAKAGLKRYYTGKQCKHGHDSERWVYNGHCVECTLETNRRRHAEIKRLMHEASKGNAVEVI

SEQ ID NO: 5901 - DNA, 642 bp, Escherichia coli
atggatgcaatttcctggcagttattaatcgaaggcgcatggacgaccctctggatttcggccatcgctatcgccttcggggtggtggctggcctgctgatcgccctggtacggatgctgcgcctgccggtgatcgaccagctgctggtggtctatatcagtctggcccgtgcgacgccgctggtgacgctggtgctatttctgttcctttccttgcccacgatgggcattaacctcgacaagaacgtggccgccatcgtggcgctgacgcttaacacgtcggcgtttaacgctgagatctggcgcaatgccttccgcacctttccgcgcgaacagcgggaggcggcggagtcggtagggatgcgccgctggacctacttccgctacatcatgctgccgcagatgtggatcgagagcctgccggcgctggtcaatgagatgtcctttttgatcaaaggtagccccgcgatcgccgtgattggcgtggtggatctcacccgggtcaccaaccgtatctcctcggtcacctacgagccgctgtcgccgatcctcgccgccggcctgctgtatgtggcgatcatcggctgtttgttgaagctgcagggtatcgcggaacgtaaagccaggcgtctggcgcgctag

SEQ ID NO: 5902 - protein, 213 aa, Escherichia coli
MDAISWQLLIEGAWTTLWISAIAIAFGVVAGLLIALVRMLRLPVIDQLLVVYISLARATPLVTLVLFLFLSLPTMGINLDKNVAAIVALTLNTSAFNAEIWRNAFRTFPREQREAAESVGMRRWTYFRYIMLPQMWIESLPALVNEMSFLIKGSPAIAVIGVVDLTRVTNRISSVTYEPLSPILAAGLLYVAIIGCLLKLQGIAERKARRLAR

SEQ ID NO: 5903 - DNA, 1116 bp, Enterobacter cloacae
atgcctttagccgattttcaccgctccgatccttttaccctcggtatcgaactggagctgcaggtggtgaacccgccgggttacgatctcagccaggatgcctcgacgctgattgccgacgtccagcatgagctgaccgtgggagaagccaaacacgacatcaccgagagcatgctggagatcgccaccggggtgtgccgcgacatcagccatgcgcaaatccagctcagcgccatccagcaggcggtccagcgcgcggcgctgcgccatcatctgcagatctgcggcggcggttcccacccctttcatgcctggcagcgccagcaaatcagcgataacccgcgctatgtcaaaaccgtcgagcattttggctatctggcacagcaggcgacggtctttggccagcatgtgcacgtcggctgccagagcggtgacgacgccatctatctgctgcatggcctgtcgcgctttgtaccgcacttcatcgcccttaacgccgcctcaccgtggtttgacagcaccgacagccgcttcgcctgttcacgcctgaaccgcttctcctcctatcccgacaacggtccgatgccgtgggtggccgactggcaggggtttcgtcgcctgttccgccagctgagctacaccagcatgatcgatagcatgaaggatctgcactgggatattcgccccagcccgcagtttggtaccgtcgaggtgcgggtgatggacacccccttgacccttgcccaggcgatccacatcgccggctttattcagaccctggcctgctggctgttgacggagcgtccttttaagcaccagcctgatgattatctgctgtacccctttaaccgctatcaggcctgccgctacgggctggacgggaccctcaccgacgtgcgcagcggggagcagcgcagcatccgccaggagatcctgcagctcgccgaccggctggcccctttcgcccatcagctgaaggcgacggcagcgctggaggcggtggttcgccaggcgaaatcgccgcaaagcgaggcgcagcagatgcgcgactttatcgccaacggcggttcgctttccgggctggtgcaaaaacactgtgagatttgggcggcataa

SEQ ID NO: 5904 - protein, 371 aa, Enterobacter cloacae
MPLADFHRSDPFTLGIELELQVVNPPGYDLSQDASTLIADVQHELTVGEAKHDITESMLEIATGVCRDISHAQIQLSAIQQAVQRAALRHHLQICGGGSHPFHAWQRQQISDNPRYVKTVEHFGYLAQQATVFGQHVHVGCQSGDDAIYLLHGLSRFVPHFIALNAASPWFDSTDSRFACSRLNRFSSYPDNGPMPWVADWQGFRRLFRQLSYTSMIDSMKDLHWDIRPSPQFGTVEVRVMDTPLTLAQAIHIAGFIQTLACWLLTERPFKHQPDDYLLYPFNRYQACRYGLDGTLTDVRSGEQRSIRQEILQLADRLAPFAHQLKATAALEAVVRQAKSPQSEAQQMRDFIANGGSLSGLVQKHCEIWAA

SEQ ID NO: 5905 - DNA, 519 bp, Enterobacter cloacae
atgcgaatattgactgtggttgattatgatgagatgtggccgactttatttgagaacgagcgtactctgttgcagatgacgcttggtaaagtgatatcccggattcatcatattggtagcacctcggtgcctggattatcagctaagccagtaatagatatattaatcgaagttgctaatcttgaagaactggacagtctgaatcaggcaatggagggtgtaggatatactgtgcgtggtgaaaacggcattttaaatcgtaggtactttacaaaaggtggaaatcagcgtagtcatcatatccatgcgtttaccactggggatgctcaaatcataaaacacctggcattccgtgattaccttattaaacacaatgacgtagccattcagtacgctttaatgaaaaaaagcgcgatgttattatgtgaaaatgacagccaccgatacagcatttataaagcggatttcattcagaaacatcttcgtatggcgcttattgatgcggatcacctgggctag

SEQ ID NO: 5906 - protein, 172 aa, Enterobacter cloacae
MRILTVVDYDEMWPTLFENERTLLQMTLGKVISRIHHIGSTSVPGLSAKPVIDILIEVANLEELDSLNQAMEGVGYTVRGENGILNRRYFTKGGNQRSHHIHAFTTGDAQIIKHLAFRDYLIKHNDVAIQYALMKKSAMLLCENDSHRYSIYKADFIQKHLRMALIDADHLG

SEQ ID NO: 5907 - DNA, 975 bp, Citrobacter koseri
atgtcgaatgagagaagaaaaaccatcggcagacagttaaatactcaggcgtcaatggtcgagatgactgacaccgatagaagccaggtatttaccttaaaaaccggcaggaaggtaacgttcaggtttgttcggatacctgcagctgacgttgaaagtatgaccttcgtaaaccaggagaacaatggacgagatcaacttgctctaaccagggagtctctgaaatccattatccagacgattaagtttcagcagttcttcccctgtattggtattaagcaaggtgaaaagattgagatactggatggttcaagacggcgagcctcggcgatttatatccgcacaggccttgatgtcatggttaccgatgaacatttatcagctgatgaagctcgccaactggctaaagatatccagacagctaaagaacataaccttcgggaaataggcctgagactgatagctcttaaagagtccggattcaatcaaaaggaaattgctgaactggaggggttatctcaggctaaggtcaccaggtcgctgcaggcggcggcagtaccgcaagacttgattgctctgttcccggttcagtcggagttgtcatttagtgactataaaatgcttttagaagttaacgaaaaactcagtgaaaagggcttaacgcctgaagaactcattcagtctgtctcagatcggcataatgcaattttaagtgattgcgagcgaccagaagacgaacagaaagccagtatactgaagctgatttctcaggcatctcaggcattgatagcgccacctcccaaggaaaagtcagtgatttccccactctggacctttgaagaaaaggacaagttcgcgcgcaagcgtgtgaaagggcgcacgctgacttatgagtttagccgtatgtcaaaagtggttcaggatgaactggacaaggctatcaatgaggtccttgaaagaaatttgagtcaataa

SEQ ID NO: 5908 - protein, 324 aa, Citrobacter koseri
MSNERRKTIGRQLNTQASMVEMTDTDRSQVFTLKTGRKVTFRFVRIPAADVESMTFVNQENNGRDQLALTRESLKSIIQTIKFQQFFPCIGIKQGEKIEILDGSRRRASAIYIRTGLDVMVTDEHLSADEARQLAKDIQTAKEHNLREIGLRLIALKESGFNQKEIAELEGLSQAKVTRSLQAAAVPQDLIALFPVQSELSFSDYKMLLEVNEKLSEKGLTPEELIQSVSDRHNAILSDCERPEDEQKASILKLISQASQALIAPPPKEKSVISPLWTFEEKDKFARKRVKGRTLTYEFSRMSKVVQDELDKAINEVLERNLSQ

SEQ ID NO: 5909 - DNA, 507 bp, Citrobacter freundii
atgaatattgatgtcgaaacacttgtgaagcaattaggtaaaccttatcaggatatttatgatcaaggtttaattccctacaaaacaaaaccaacgggtactattagtgatgatatttccaggttgaatatgaggcgagaaggaatatttttatcttttatcaataaccaagaaaaaaatcttgaagaagtgactttgcggttagaagatgaaaataaaatggattggttatttcctaatccgctgccatttggtcttgaaccagtaatgacccagaaatgggtaagggccaaacttggtcatccaatgatttacactgatgcgcagataatcatgactatttatgttggtgtgaaggaattttatactttgcctgtccctcatcaatatatcgttgctgcatttacctataacaaagatttttttgtacaaaaagtcacattttactcaattgagcgagccaaagaaatacaagccgcgttagagataaaaaggttgggtgggtaa

SEQ ID NO: 5910 - protein, 168 aa, Citrobacter freundii
MNIDVETLVKQLGKPYQDIYDQGLIPYKTKPTGTISDDISRLNMRREGIFLSFINNQEKNLEEVTLRLEDENKMDWLFPNPLPFGLEPVMTQKWVRAKLGHPMIYTDAQIIMTIYVGVKEFYTLPVPHQYIVAAFTYNKDFFVQKVTFYSIERAKEIQAALEIKRLGG

SEQ ID NO: 5911 - DNA, 231 bp, Klebsiella pneumoniae
atgattcatatcggtgaggaaggtgcccagaaaacggacacatccaatttgcagggcaatgcccagacggttgtgatcacctctgctttttccgataaattccttgtctgcttcatcaaggtgaaaatatcgtgccagctgaagctcatccggttcaccggtgaatctgccatagctttcagtctgctcagtggtcagaaagtcaacgggcatatcggcctccctgcctga

SEQ ID NO: 5912 - protein, 76 aa, Klebsiella pneumoniae
MIHIGEEGAQKTDTSNLQGNAQTVVITSAFSDKFLVCFIKVKISCQLKLIRFTGESAIAFSLLSGQKVNGHIGLPA

SEQ ID NO: 5913 - DNA, 303 bp, Enterobacter cloacae
atgaagataatctcagtgaaaaccttaagggacttctgggcggagaatcccgacgctgaacaaccgctaaaggcctgggtagacgaagcgacaaaagcagactggaaaaccccggcggagataaaggaccaataccgcagcgcaagtattctgaaaaataagcgggtggtattcaacattaaaggaaatgattaccggttaatcgtagccgttgcttatctgcgagggtgggtgttcgttaagtttatcggttcgcataaggaatatgacgagataaacgctgagacgatagagaggaagtaa

SEQ ID NO: 5914 - protein, 100 aa, Enterobacter cloacae
MKIISVKTLRDFWAENPDAEQPLKAWVDEATKADWKTPAEIKDQYRSASILKNKRVVFNIKGNDYRLIVAVAYLRGWVFVKFIGSHKEYDEINAETIERK

SEQ ID NO: 5915 - DNA, 693 bp, Klebsiella michiganensis
atgtattacagcaatgttgtcatcagctatttacaggccaataaaattctcgcaatgaaacttgatcgcgctgtttcaggcacagaacaacgggtttccggtcaggttaaaacaataggtgctggcgtaactcgaatcctatattatacatcctgttttactgatgagtatcaggatgtatgtaaaaagcagaagaatgaggatgttagatttgctaaaggtatctaccatcttttacagcgtaagaatattgtatatgaaatactgaaaatatattttgaagaaatatttaagcacaaaacaacagagcagttagagcatattaaaagaattctgatggctgttaacattcatatcgctgcagactctctaaccaaatctggatttgttttagctacggctacctgtgtttcggttggcatgaaactaagccttgatatgggagcgattgctgggcgttctgcgggggtcgccgttacagtggctggtatgtatggcgttgtgcagagggctgcagatagcgctgagcgtctccgaatctgttatcctgcattcttttctatactatacgaacaagaacttgaaatgatgtatttcctggtggcgccattatttgaacatgccgacgcttttaaagcccaatgggcttcagaggcagagctcgctaatatcatcgaaagaatgattaggtag

SEQ ID NO: 5916 - protein, 230 aa, Klebsiella michiganensis
MYYSNVVISYLQANKILAMKLDRAVSGTEQRVSGQVKTIGAGVTRILYYTSCFTDEYQDVCKKQKNEDVRFAKGIYHLLQRKNIVYEILKIYFEEIFKHKTTEQLEHIKRILMAVNIHIAADSLTKSGFVLATATCVSVGMKLSLDMGAIAGRSAGVAVTVAGMYGVVQRAADSAERLRICYPAFFSILYEQELEMMYFLVAPLFEHADAFKAQWASEAELANIIERMIR

SEQ ID NO: 5917 - DNA, 369 bp, Klebsiella variicola
atgaaaatctacgatatcacgcccatcggcaaacccaggatgaccagagctgataagtggaagcagcgtccggcggtaatgcgctaccgggcattctgcgatgaggtccgtctgaagaacgttgctatgccggagcagggcggacacataaccttcgtggttcccatgccaaagagctggagccagaagaagcgagtaacgatgaacggacaggcacaccagcagaaaccagacgccgataacatgatcaaagcgctgatggatgatctgtttactgatgacgcacatatctgggactttcgtgtaacaaaagtctggggtgaatccggacaaattttaatttctgatatcggagaagtggccgcatga

SEQ ID NO: 5918 - protein, 122 aa, Klebsiella variicola
MKIYDITPIGKPRMTRADKWKQRPAVMRYRAFCDEVRLKNVAMPEQGGHITFVVPMPKSWSQKKRVTMNGQAHQQKPDADNMIKALMDDLFTDDAHIWDFRVTKVWGESGQILISDIGEVAA

SEQ ID NO: 5919 - DNA, 690 bp, Enterobacter cloacae
atggaactgctgttactcagtaactccacgctgccggggaaagcctggctggaacacgccctgccgctgattgccggtcaggtcaaaggccgccgtaaggcggtattcatccccttcgctggcgtgacgcaatcctgggatgattatacggccaaagtggctgcggttatggcgcccatggcggtcagcgtaaccggtatccacagcgtcgacgaccctatcgccgccattgaaagcaccgagatggtgatcgtcggcggcgggaacaccttccagctgttgaaagagtgccgcagtcgcggtttgttggcgccgattgtcgatgtcgtcaaacgcggggcgctgtatatcggctggagtgcaggttcaaaccttgcctgcccgaccattcgcaccaccaacgatatgccgattgtcgatccgcagggatttgatgcgctggggctgttcccgctacagattaacccgcacttcaccaacgcgttgccgaccgggcatcagggcgaaacccgcgaacagcgtatccgcgaactgctggtcgtggcgccggaattaacggtgattggtttgccggaaggaaactggatccaggtcaccgatggtcacgcgacgctcggtggcccgaacccgacgctgttgttcaaagcgggggaagaagcgataaccctgcctgcgggccaccgcttctga

SEQ ID NO: 5920 - protein, 229 aa, Enterobacter cloacae
MELLLLSNSTLPGKAWLEHALPLIAGQVKGRRKAVFIPFAGVTQSWDDYTAKVAAVMAPMAVSVTGIHSVDDPIAAIESTEMVIVGGGNTFQLLKECRSRGLLAPIVDVVKRGALYIGWSAGSNLACPTIRTTNDMPIVDPQGFDALGLFPLQINPHFTNALPTGHQGETREQRIRELLVVAPELTVIGLPEGNWIQVTDGHATLGGPNPTLLFKAGEEAITLPAGHRF

SEQ ID NO: 5921 - DNA, 564 bp, Enterobacter hormaechei
atgaatacacgattatttacgttcgctggtggagaaacgggtgtttggcgcgttgttcggatggatgccgtggcgggagcccctctccctggaatcccccggctcgacgtagccgctggctctgtttcgccgcagcctttgggcaccaaatggcttcttcgcgggataacgagtaacgagcgttatgtcgtgcgtgaagagaaggatcgtctcgtggcgaagcagccaagtttgggtcgagcagaggccacctgtgccgccctgatccctatccggaaaaacccctcatggtggggactggctcaagacgaacgccggaagatttttgaggagcagtcccgtcacattcacattgggctccaatatctccctgctgtggcccgtcgtctccaccattgtcgggacctgggcgagagcgaacccttcgacttcttgacgtggttcgaatattccccgtctgatgagccgggctttaacaggcttttggccgaactccgggcctcggtggagtggaagtatgtcgacagagaaatcgacatccggctagtgcatgagccggcctag

SEQ ID NO: 5922 - protein, 187 aa, Enterobacter hormaechei
MNTRLFTFAGGETGVWRVVRMDAVAGAPLPGIPRLDVAAGSVSPQPLGTKWLLRGITSNERYVVREEKDRLVAKQPSLGRAEATCAALIPIRKNPSWWGLAQDERRKIFEEQSRHIHIGLQYLPAVARRLHHCRDLGESEPFDFLTWFEYSPSDEPGFNRLLAELRASVEWKYVDREIDIRLVHEPA

SEQ ID NO: 5923 - DNA, 861 bp, Klebsiella pneumoniae
atgtcatctgaaaatactctcccgtcggtcgatctgatgtcttgccagcatggcggtgaagtgatcccgtccattgctattgagcgcattatctcgttgcgaaatgaaggtctccgcgtctatctcgacggcatagacaagctgcgaaaagcgcgcgatctgatgcagcaggccggaggctgtcagtacctgtatgactacgacaaagccgtagagagcgccatcaaatggagcgacaccacgccagatcaggccgaaacggctatttcccgcgttatcgacggaaaaatctgggatcggctgatgacggaaaccggtatgtatacgctgatgagcaacaagcaacgtcaggaatgggatcggcaggtggcaggcaaagaaatgccgccgataacgctggataacgttatgagtacgttccggcacctgaacgcaagcaaggctgataccttcacgcaagggctgattgatatctttaaatccctgtcgtgggattataaaaccaataacccctgcatgtttggcaagcgtatcatcatcgcgccgttgctcgatgtctggcgcagtggctgggtgcgcttcagctcagacgggcacaccaaaattgacgatctggcgcggccgttctacgtgctggacgggcgtaacgtgccagattaccgcgtttctgacggtgccagactggatgcctttttcagtgaaaaccagttcaacggtaaggtgttcgagtgtgattacttcagcgtgcgatattacaaaaagggcagcgcgcacattacgtttaaacgcccggatctggttgagaagatcaataatctggttgccagtcactatcctgggatgttaccccctcgcgtgtaa

SEQ ID NO: 5924 - protein, 286 aa, Klebsiella pneumoniae
MSSENTLPSVDLMSCQHGGEVIPSIAIERIISLRNEGLRVYLDGIDKLRKARDLMQQAGGCQYLYDYDKAVESAIKWSDTTPDQAETAISRVIDGKIWDRLMTETGMYTLMSNKQRQEWDRQVAGKEMPPITLDNVMSTFRHLNASKADTFTQGLIDIFKSLSWDYKTNNPCMFGKRIIIAPLLDVWRSGWVRFSSDGHTKIDDLARPFYVLDGRNVPDYRVSDGARLDAFFSENQFNGKVFECDYFSVRYYKKGSAHITFKRPDLVEKINNLVASHYPGMLPPRV

SEQ ID NO: 5925 - DNA, 192 bp, Klebsiella pneumoniae
gtggtcatcggcttcatcggagtgcttctcgtggtcaagccgggctatctgccgttccaattgggtcatttggctgccatcggcaccgggctggccacggacgcggcaatcatcatcctcaggcgcgtcggcggaaaggtgaagaccaccagcatgctgggcatcagtgcccggcgcttgcagcgcggctga

SEQ ID NO: 5926 - protein, 63 aa, Klebsiella pneumoniae
MVIGFIGVLLVVKPGYLPFQLGHLAAIGTGLATDAAIIILRRVGGKVKTTSMLGISARRLQRG

SEQ ID NO: 5927 - DNA, 1017 bp, Morganella morganii
atgagtgaattaaactgtgataataccgatgtttatgtctacataggcgacataactagaacaggttatgataacctgtctgcacaaatagaaaacagagtaaaagaagataagatatctgaaaacgtaattttttgtatatctacttatggtggagacccgaacgcaggctatcgaatggggcgggcgttgcagcattattacgctggaaatgtttccgttcttgtgccaagcttatgcaaaagcgctggtacacttgctgtaatatcagcaaacaatttaattattggtgatcgcggcgaactggggcctttagatatacaactgagaaaggccgatgaaatgggggagtcaagttcaagcttagatatattcaaagctgtcgatcaactcgaatcaagaactttatccgcctttagacaatatttaacagatattaagtatggaagtggcattagcacaaggctatcagctgacatagcatcacagctagtaagcaacttatttcagccagtagccagccaaatagacccgcacaaaataggtgagcatcaaagagcgatgggtatcgccttatcctatggcgaaaggctaaccaaaaaatctaagaacctgaagggtgatgccttaaacaagctgatagttggttacccatctcatggatttgtaatcgacagaagcgaagctaaggaactttttagtaaagtaaattgtcctagtgggctatctgctactgtatacgaaattgttagtggctgggttacacagaacccagccatcattgggaatcaaccattagttattgattttgaagaaattttaaagaataaaatttccgaggaatctaacaaagagattaaagaaaatgacaatagagataatggaactgagccggaacctgtcgagggcgaaccagtcggaactgaatctagtgaagctggtgagcaaccagaacaaagagatgaatcgggaactaaaaaaagcagaacaacaagaagcaaaagtaaagcttcataa

SEQ ID NO: 5928 - protein, 338 aa, Morganella morganii
MSELNCDNTDVYVYIGDITRTGYDNLSAQIENRVKEDKISENVIFCISTYGGDPNAGYRMGRALQHYYAGNVSVLVPSLCKSAGTLAVISANNLIIGDRGELGPLDIQLRKADEMGESSSSLDIFKAVDQLESRTLSAFRQYLTDIKYGSGISTRLSADIASQLVSNLFQPVASQIDPHKIGEHQRAMGIALSYGERLTKKSKNLKGDALNKLIVGYPSHGFVIDRSEAKELFSKVNCPSGLSATVYEIVSGWVTQNPAIIGNQPLVIDFEEILKNKISEESNKEIKENDNRDNGTEPEPVEGEPVGTESSEAGEQPEQRDESGTKKSRTTRSKSKAS

SEQ ID NO: 5929 - DNA, 210 bp, Morganella morganii
atgaagggtaagggaacgaactttaaaacgctgatgtgggcgtataacgaagagcgcgtggcgcgcaaactgaaatatatcagaaactgcaaagactataaccggaagctgtataagccatacaggtgtgagcgggttatgtttcgccttttgcggctggattttaaacgtgttttcggcagggagttaaccaccaatgaaatggattaa

SEQ ID NO: 5930 - protein, 69 aa, Morganella morganii
MKGKGTNFKTLMWAYNEERVARKLKYIRNCKDYNRKLYKPYRCERVMFRLLRLDFKRVFGRELTTNEMD

SEQ ID NO: 5931 - DNA, 312 bp, Proteus mirabilis
atgtggtatacaggcaattttgtactcgaggctatcaggttagctgaagcttgggattttaaagttaaaaatatgtttgggttcgcatgggttaaattaaataaaaatgcagaagatagaataaataaaaaacagccaaaggactttttcgatttcatggaaatattaaataatgagacgaaaattaattgtggtaattatattcgtcaaaatatcgaaatgtgtttaatagccacaagaggaaatggattacctcgtcaatctgcaagtgttcgacaagttatttatttgtgcttagatgaacacagctaa

SEQ ID NO: 5932 - protein, 103 aa, Proteus mirabilis
MWYTGNFVLEAIRLAEAWDFKVKNMFGFAWVKLNKNAEDRINKKQPKDFFDFMEILNNETKINCGNYIRQNIEMCLIATRGNGLPRQSASVRQVIYLCLDEHS

SEQ ID NO: 5933 - DNA, 279 bp, Pseudomonas aeruginosa
atgagcactccgcaagaaatggcctggctcacgacgatttctgtgcccacggtgcaagctggagagaagtatgtgcgccttacaggactacccgataaccgtaggaaggacgcttggaagacgatcacgagtaaccatcctgggttagcggatctccttcggtcacctgagctaaaggaagtcgtcgcgttcttcgacgcagacatttacgtcgatgcggaggtggtgcctgctttgccggcggagccactcaaagggcgaaagcaggccgtaccctaa

SEQ ID NO: 5934 - protein, 92 aa, Pseudomonas aeruginosa
MSTPQEMAWLTTISVPTVQAGEKYVRLTGLPDNRRKDAWKTITSNHPGLADLLRSPELKEVVAFFDADIYVDAEVVPALPAEPLKGRKQAVP

SEQ ID NO: 5935 - DNA, 921 bp, Pseudomonas aeruginosa
atgaaatcgacacaaaaaacccgccaaaaaaatcttgtgcatttttctggccacgaaacgttccccctacgtcaaatgtggctcaaaaaggcttttgatcgagcagatgacggctgcctaattcacaagtctacgttcactgaagagtcggctgttgctgcctttggcgtcggaaaaaacatggtgacatcaatccgccattgggctttggcttgcggcatgatgtatgaaagtgacgacggcttccgcatcggtagcttagctcgcgaaatcctcaaagacgaaggactcgatccgtatgcggagaatccttcaacagcatggctcattcattggcagcttgcaggcaaatgctttcgttcgaccacatggtattggctatttaaccatgtgacagcccctacttttactcgtcaagagcttgaggagcctttggcaaattacgcacgcgagcgggatccaaaacatcgcctatcgaactcaacaatctcccgcgacctagaaacatgcctgcgcagctacgctccacgcgtggccggtggctcccccgaggatttggcagagcccattttgggtgagctaggtctattgcaagaagttcataaaggtcaatacgccttccggcgcggccctaaagcatcactacacgatggtatttttgcctatgcgcttgttgacttttggagtcaacaagcagagggacaaagttcattagcatttgaaaccatcgcttatgcggaaggctcaccaggccgtgtcttcaagctcgacgaagaatcaatagctcaacgattaatcgcactctcggacttcactgatcacaagctcgaatggacggactccgccggcttgcgacaagtccatcgaaagactctaactaaagaagacattaggaatatgatcaggcgcgcctatgactga

SEQ ID NO: 5936 - protein, 306 aa, Pseudomonas aeruginosa
MKSTQKTRQKNLVHFSGHETFPLRQMWLKKAFDRADDGCLIHKSTFTEESAVAAFGVGKNMVTSIRHWALACGMMYESDDGFRIGSLAREILKDEGLDPYAENPSTAWLIHWQLAGKCFRSTTWYWLFNHVTAPTFTRQELEEPLANYARERDPKHRLSNSTISRDLETCLRSYAPRVAGGSPEDLAEPILGELGLLQEVHKGQYAFRRGPKASLHDGIFAYALVDFWSQQAEGQSSLAFETIAYAEGSPGRVFKLDEESIAQRLIALSDFTDHKLEWTDSAGLRQVHRKTLTKEDIRNMIRRAYD

SEQ ID NO: 5937 - DNA, 1986 bp, Pseudomonas aeruginosa
atgataaggaaaaagctcagcacacagaaaagtaaaggagaaacacaaaacacactcgggtatggtttaaaaaaatctcttctaatagatagcaacagacttcaaaccggcacaacgcaagaattcattgagttcttagcgaagaaaatagataaatcttgtaaaggaaaacagaaaaataccagctttcacgaaatggtatcttttgacccatccgacaaaatcacacccgaacaagcccttgccatagcaaaagaactttattcagatactcacgggttaaaccgtgagcacgcttttgctgttcatacagacactaaacaaattcacgttcactttatttgggcacccagagacttcaacaataaaatatataatcaggttgatgattatctcgccatagagcagaagctaaccgaactcgaaaagaaacacggactatttcaagtcactaacagaaaatctttaaaccctgacttagaaacaaagccaccagagagcagcaacgaaaaagctcttgaagtcagaggtataaaatcccacaagaaagcattcaaagaagaaattgaaattgcttttaaagatacactcacaactactgctttccttgctaaccttcacaagcaaggctttgatattatcccgaatggacagaacgcctattcattagaaaaagaaggccaagtatttaaggccagtgagttaggtattcaacactcgaagctaaaaaacaagcttcaagaacagcatcaatttagtgaactgatggagcactattcaaagaaagctcgtagatacaatgtggaattaaacctttctacaaatgaagatgttgagtttcttaaaaagaataaatacaaaaccgtccttgaaaagaaatttacacatcaagaatccggcagcaatgtggagcacttctttaaaaactctaccagccagaaggcttttgaataccataaagacccttcaaaagttacatttcaagacttatcaagggacagtataaaagctggacttcaacggctaacaactgacatgaaaaagccggggccgttatatgttcatggcccagactacgcaaaaaagaaaatgtggatggagttcaagatgatgaaccttgaagataagggtttcacattgtcaggatataaacctactcaacaagacttgaaagagcttgaacaaagaaaagctgactatgaattacaagctcaaaaatggaaggccaagaaagtcgtagaagagcctaaatcagttgagcctgtcattgctccacctgtcatgcctacgcctgctcaaaccgcaccagagacactagaagagcccatcaagcaggttgaacaggaaagaaatttcgatagcttatttgatgagttggaacatgagttcagtgacaaaacatcaccagtggatagctttaaagacattttgtcaaatgtcacaaccgatatgctttgcgtcacccacggcagtatcacttgccgcacctgctttggttcaaacatggaaaatgcacctgcatttaaacaacatgagttcattaatatcaatgtcgaaatagcagccgcatatgctgacgctggtcgagtgttgaaagaagaatttaatcagctattaagtgacagggttgatgaattgcaatcaacaccagagcatcaagaacaagttgaagctgcatacattgcaaatattgaaactgatttccatgagtttattggaagccttattgataaacataccagctacgacaagattgaaatattaaagcatgttcacaacgttttagaagataatgatgagattgttgccgacgcaaccctatactatgacattattgaaaaggttgaccagttggacaagcgtgagcgtgaaatatgttcggcttatgttcaaaagctaattgatgatgattcaggtgctccaattgatggagaattaaagaacacagatgtgaaaagtaaaagaagaacgaaatacaagtattaa

SEQ ID NO: 5938 - protein, 661 aa, Pseudomonas aeruginosa
MIRKKLSTQKSKGETQNTLGYGLKKSLLIDSNRLQTGTTQEFIEFLAKKIDKSCKGKQKNTSFHEMVSFDPSDKITPEQALAIAKELYSDTHGLNREHAFAVHTDTKQIHVHFIWAPRDFNNKIYNQVDDYLAIEQKLTELEKKHGLFQVTNRKSLNPDLETKPPESSNEKALEVRGIKSHKKAFKEEIEIAFKDTLTTTAFLANLHKQGFDIIPNGQNAYSLEKEGQVFKASELGIQHSKLKNKLQEQHQFSELMEHYSKKARRYNVELNLSTNEDVEFLKKNKYKTVLEKKFTHQESGSNVEHFFKNSTSQKAFEYHKDPSKVTFQDLSRDSIKAGLQRLTTDMKKPGPLYVHGPDYAKKKMWMEFKMMNLEDKGFTLSGYKPTQQDLKELEQRKADYELQAQKWKAKKVVEEPKSVEPVIAPPVMPTPAQTAPETLEEPIKQVEQERNFDSLFDELEHEFSDKTSPVDSFKDILSNVTTDMLCVTHGSITCRTCFGSNMENAPAFKQHEFININVEIAAAYADAGRVLKEEFNQLLSDRVDELQSTPEHQEQVEAAYIANIETDFHEFIGSLIDKHTSYDKIEILKHVHNVLEDNDEIVADATLYYDIIEKVDQLDKREREICSAYVQKLIDDDSGAPIDGELKNTDVKSKRRTKYKY

SEQ ID NO: 5939 - DNA, 684 bp, Enterobacter cloacae
gtgaaaactgtcggtgacagcaagctgaaagaagcgtttatcgaagctcacgatctgcgaacggcgctttcgcccccgctgctggccgctttgcgcctggtcagggtcgaggccggtgaatacctggtgacgcaaagcgatcggttgacccacctgttttttctcgtgcagggaaaattgcaggttgagaattacgatgtgaacggcatgcacatcgtcttttccttcgaaacggatttctccgtgataggcgatctggagctgttttcccaggcgcagcgggcggtgttcagcaccgttcaggcggtcacggacgcgctgatcttcacgctgcctatcgaggccatcaaagagcgggccatgcacgatcctgttttcctcgcctttatgtgccggcagttgagcgacaagttgcttaacgcttcattgctgcatgcgagcggcggcttaacggcagaatataagctgcgcaaatttttgttatttaaaataaagcaggaaggcgtgcagattcagctcgaaaacagggagttgctggcgggcagattagggatctccgtcaggcagctgagccgcgcgctggcgcagctcgcggcggacggtattattcagtttaaaaacaaatcgctacgggtggtggatagccaacggctggccgacatcaacgggagcgccaggatctag

SEQ ID NO: 5940 - protein, 227 aa, Enterobacter cloacae
MKTVGDSKLKEAFIEAHDLRTALSPPLLAALRLVRVEAGEYLVTQSDRLTHLFFLVQGKLQVENYDVNGMHIVFSFETDFSVIGDLELFSQAQRAVFSTVQAVTDALIFTLPIEAIKERAMHDPVFLAFMCRQLSDKLLNASLLHASGGLTAEYKLRKFLLFKIKQEGVQIQLENRELLAGRLGISVRQLSRALAQLAADGIIQFKNKSLRVVDSQRLADINGSARI

SEQ ID NO: 5941 - DNA, 2892 bp, Serratia marcescens
atgccggtatatgcaaaacccgaggaactgaataacgatttcgcgccggccggtagtatgctggcgcagccttcaggcttcgacgtttctctgcctgaaggtacaaaccctcgacctcaagaagaatcaccgtcggtatggggcgctgctttccgccagaataacgtcttggctggcatgttccagccgacaaagcaatttgagcccgtggagggttataacccttatgctgataaaactgagctgcagggttatgagcaatgggcgacggcgttttctgatgcgaattcaccgcaggaaaccgcgtggatcaaacagcagatcgatgatgaaaatgaagatcgccgggttctgtctgaagcgggtggcgtggggacattggccagtattgccgccggagctgttgatcctgtgacagtcgcttctatgtttattcccggcgcacagggcggcgcgctggcgcgtattggatcgcaggtggccattggcgccgcaggaacagccctcagtgaagtagcattgaacaaccagcaggttacacgcacatggggggagagcgccgctcacgttgccgccggtgcgttgctgagcggtgtttttgccagtgctggcgctgctatctctccatcggtaaggaccgcggccacacgcgaagtcggcgacgctctggataacctgagtgtaaccagcgccgtggataatgcagccgcctctctgccggacggtggaagcgttggcgccgctcgcataagcgaggcgacgctggaagatttgacgccggtatcaggtggcgcgatcggcacgctcgcccgtaaagccggcagctacctgacgccggtcacgcgcttgattgagtcaccatccaagaccgcccgccgcactgcgctggaactggcggaaaacaacttcacgcttgaggggaacctgcgtggtattgagacgccgatcgcggcggaaacccgcgttcgtggttggcgtcgtgaagaggccgcggtcgtagtaaccaacaagcaggcctatgcaaaatataaggccgatggcggcgatctcggtttcgcctcatttcgggaagaggtgggtaacgccatgcgcaacggcgacattcacggcaattcagcggtgcaggatgcggcgcgcgcgatgcgccaggtggtggatagggtgaaggtggcgcagcagaaacttggccttttacccgcagacgaagagcttaaagctattgggcaaaccagctacttcccacgcgtttacaaagtcgggaagatcatcagtgagcgcgataagtttcgcaacatgctggtagattggtggtctcgcggtgaaaaaaccatgtcgcgtgaagaggctgaaattactgctgacgcgaccattaacaaaatcgtgggcgccaaaattccgcaggatttcgccaacgtgttcacggtcaaagcggccggcagcaccaggtcgagaacgcttagcgttcctgaccgactgatgaaagactatctggaaagcgacgctaattacgtcctgcagcgccatatccgcgaggcgtcggcggaagtcgagttaacccgcactttcgggaataagagcctcgataagcagttgaaggacattcaggacgaatacgacgcgctgatgcgaagcaagccagccgagcaggcaaaattggcgaaagccagggacaatgatattcgcgatataaccgcgctccgcgaccggctggttggcacctatggcatgcctgacgatccgtcgtcgttctttgtgcgcgctggcgctttcctgcgtagcgccaactttgtcacgaagctgggcggcatgaccgtttcggccatcccagacttggctcgcggcgtgatggtgaacggctttagcaactcaatgcgcggttactctgcgctgatcagccgttcgccggcattcaaagccagccgggccgagatgcagaaaatggcagttggtctggaaaccatcttgcatacgcgggcgcgcacgatgggcgatctggtggacagctcatcgcgtactacggccgtagaggccggcatggagcgcgttaccgatgtgttcggcaagctgacgctgatggggcatttcgacgacgtgaacaagtcggtaaacggcatgataacgtcggacagtattctatctggagcggccgccgcgaagaaactggcgaagctcgggatcaaccccaacatggccggccgtatccgcagcgagttccagaaacacggtgaggtgatcgacggttggcatattggcaattttgaaaagtgggacgatcagcacgttgccggcgtattccaggcggcggtattaaaggacgtcaacaacacggttattacgcccggcatcggagacacgccattatgggccagcaccccgttgggaaagacggtattccagtttaaatccttcgctacagcgtcatataaccgcgccacgctgggcggcctgcaagagggaacagctcaattctactatggcaccgcttttcagatcggccttggcgcgctgacgtatgcattgaaacaggcggccaacggtaaagaggtggagatgacgcctcaaaaattggtactggaaggtctggatcgttctggtatccttggcccactcatggaatataataatatggcggaaaaggcatcgggaggcatggttggcctgggagcaattttcggaactggaacacagtcaaggtatgccagtaggggttttataggttctgcgctggggccaacttttggcctgttggatacgctgactgatgtcacctccggcgtgctaaatggggatgcaggggatcgggttattcacaacgcccgcacccttttacctggcaataatttattttggatagcaccacttattaatcaggttgatccgggcatgcgatag

SEQ ID NO: 5942 - protein, 963 aa, Serratia marcescens
MPVYAKPEELNNDFAPAGSMLAQPSGFDVSLPEGTNPRPQEESPSVWGAAFRQNNVLAGMFQPTKQFEPVEGYNPYADKTELQGYEQWATAFSDANSPQETAWIKQQIDDENEDRRVLSEAGGVGTLASIAAGAVDPVTVASMFIPGAQGGALARIGSQVAIGAAGTALSEVALNNQQVTRTWGESAAHVAAGALLSGVFASAGAAISPSVRTAATREVGDALDNLSVTSAVDNAAASLPDGGSVGAARISEATLEDLTPVSGGAIGTLARKAGSYLTPVTRLIESPSKTARRTALELAENNFTLEGNLRGIETPIAAETRVRGWRREEAAVVVTNKQAYAKYKADGGDLGFASFREEVGNAMRNGDIHGNSAVQDAARAMRQVVDRVKVAQQKLGLLPADEELKAIGQTSYFPRVYKVGKIISERDKFRNMLVDWWSRGEKTMSREEAEITADATINKIVGAKIPQDFANVFTVKAAGSTRSRTLSVPDRLMKDYLESDANYVLQRHIREASAEVELTRTFGNKSLDKQLKDIQDEYDALMRSKPAEQAKLAKARDNDIRDITALRDRLVGTYGMPDDPSSFFVRAGAFLRSANFVTKLGGMTVSAIPDLARGVMVNGFSNSMRGYSALISRSPAFKASRAEMQKMAVGLETILHTRARTMGDLVDSSSRTTAVEAGMERVTDVFGKLTLMGHFDDVNKSVNGMITSDSILSGAAAAKKLAKLGINPNMAGRIRSEFQKHGEVIDGWHIGNFEKWDDQHVAGVFQAAVLKDVNNTVITPGIGDTPLWASTPLGKTVFQFKSFATASYNRATLGGLQEGTAQFYYGTAFQIGLGALTYALKQAANGKEVEMTPQKLVLEGLDRSGILGPLMEYNNMAEKASGGMVGLGAIFGTGTQSRYASRGFIGSALGPTFGLLDTLTDVTSGVLNGDAGDRVIHNARTLLPGNNLFWIAPLINQVDPGMR

SEQ ID NO: 5943 - DNA, 648 bp, Serratia marcescens
atgcctcgggcatccaagcagcaagcgcgttacgccgtgggtcgatgtttgatgttatggagcagcaacgatgttacgcagcagggcagtcgccctaaaacaaagttaggccgcatggacacaacgcaggtcacattgatacaccaaattctagctgcggcagatgagcgaaatctgccgctctggatcggtgggggctgggcgatcgatgcacggctagggcgtgtaacacgcaagcacgatgatattgatctgacgtttcccggcgagaggcgcggcgagctcgaggcaatggttgaaatgctcggcgggcgcgtcacggaggagttggactatggattcttagcggagatcggggatgagttacttgactgcgaacctgcttggtgggcagacgaagcgtatgaaatcgcggaggctccgcagggctcgtgcccagaggcggctgagggcgtcatcgctgggcggccagtccgttgtaacagctgggaggcgatcatctgggattacttttactatgccgatgaagtaccaccagtggactggcctacaaagcacatagagtcctacaggctcgcatgcacctcactcggggcggaaaaggttgaggtcttgcgtgccgctttcaggtcgcgatatgcggcctaa

SEQ ID NO: 5944 - protein, 215 aa, Serratia marcescens
MPRASKQQARYAVGRCLMLWSSNDVTQQGSRPKTKLGRMDTTQVTLIHQILAAADERNLPLWIGGGWAIDARLGRVTRKHDDIDLTFPGERRGELEAMVEMLGGRVTEELDYGFLAEIGDELLDCEPAWWADEAYEIAEAPQGSCPEAAEGVIAGRPVRCNSWEAIIWDYFYYADEVPPVDWPTKHIESYRLACTSLGAEKVEVLRAAFRSRYAA

SEQ ID NO: 5945 - DNA, 1023 bp, Serratia marcescens
atgctagatgaaagagatgtgcttggtccggttcctaatcgtatacgtataggcattcctattgttaatgagcggttatttccgtttggttcggaaaaaattgaatattttgatggtgctataagagatcaattttctccctcgcataactatatagcttacgtgccgaaaggagtagtaaggaatcatgggaaacctttatattttcattatactaagcttgatagtttcaagaatatattaagctctggggctttctgggcatcggagttgggtaaaatgaacgatgcccaggaagtaacctacgctaaagatagacttattgaccaattatctaacattatgcaaaaacaaagtgtgccgttagagatgagaaggcgtttggtaggggaggtaaataaattctttatggatgaggtttgtcaagggttatattgtgtttcgttaagtaaaagaggaaatttacttagtcagtgggttaagtactctcaagaagagggtgtttccttcgcattgaatacgcagttgatagacgccattcctaatcactataaaggggctaaatgtataggtgttatctatggcatgaaagaacagcaagttatcttgcaggatcttgctagtagactgttttccagtttgatgagggtctcaagtgttcaaaacgtgcgtgagctattaattaacgaatataaggaagagctaagctatatagtatgtgccataaaaaacccgtcctttgcagaggaggatgagttaagaattataattcctcgcgatagcaacgagaaatctgtaagagttcgaccagagggaggtggcacatacttagaattgaattttattaaggtttataatagagccccagttatagatttacttatagagtatgctttttctgcaccaactagagacgaaaagaaagctttaaataagatatataaaatcctgtcatataagaaaatcaaattcggatttcttgtcggttcaggttcttcttacatttggcccggtacaagatag

SEQ ID NO: 5946 - protein, 340 aa, Serratia marcescens
MLDERDVLGPVPNRIRIGIPIVNERLFPFGSEKIEYFDGAIRDQFSPSHNYIAYVPKGVVRNHGKPLYFHYTKLDSFKNILSSGAFWASELGKMNDAQEVTYAKDRLIDQLSNIMQKQSVPLEMRRRLVGEVNKFFMDEVCQGLYCVSLSKRGNLLSQWVKYSQEEGVSFALNTQLIDAIPNHYKGAKCIGVIYGMKEQQVILQDLASRLFSSLMRVSSVQNVRELLINEYKEELSYIVCAIKNPSFAEEDELRIIIPRDSNEKSVRVRPEGGGTYLELNFIKVYNRAPVIDLLIEYAFSAPTRDEKKALNKIYKILSYKKIKFGFLVGSGSSYIWPGTR

SEQ ID NO: 5947 - DNA, 294 bp, Serratia marcescens
atgataatctggatcaacggacctttcggcgccggaaagacgactctcgctgagcggctgcgcgatcggcgtccgaaatcgctgatctttgaccctgaggaaatcgggttcgtggtgaaagaaacggtccccataccagcgagcggagactatcaggatctccccttgtggaggggacttacgatcgctgcggtcagcgagattcgcaggaattactcgcaggacatcatcatcccaatgacgctcgtgcacccggactatcagaggtggctcgggaaatctgcacagcggtga

SEQ ID NO: 5948 - protein, 97 aa, Serratia marcescens
MIIWINGPFGAGKTTLAERLRDRRPKSLIFDPEEIGFVVKETVPIPASGDYQDLPLWRGLTIAAVSEIRRNYSQDIIIPMTLVHPDYQRWLGKSAQR

SEQ ID NO: 5949 - DNA, 1101 bp, Serratia marcescens
atgaaaaaacacatcttgctgattatcgacggcctgccaggcggcggcgcggaaaacgtcactctgacgctggccaaaggctttcagcagcggggctgcgcggtcacgttgctgtcactcagtgctcgcctcgactatgagatccctacaggggtgaactatatcgtcgatcatgacaccaacaacgggccgtttcgcaaaacccatgaactgtcgcgccgcgccgcctcgatggatcgtttgctgcccaacttattcgccgagttgggcaaacctgcactggtgatttcccatctgcacaaaaccgaccgtattgtcgttcgctcgcgcgtgctgaaagagtgcaatgtttggtactgcatccacggcatgttttcccgcacttatcttgggaataaaacagggttcagtcgctggttaaaacagaaaaaagtgcagaaggtctacagaaatcgcaaggtcatcaccgtgtccgaagccatcggcgccgacctgatcgagcagaccggcattcgccctgaaaagctcattacaatttacaatccttttaatatcaaagaaatagaaaatcgcgccgcacagaaaaacctcttcgccgacgaagattacatcctgcacgtcggccgttttcatcaggtaaaacgccacgatcggctgctggcggcgtttgcactggctgatctgcccgcaaagctggtgttgataggccagggagaggccgccgttacacacgccattcaagaaaaaattacggcccttaacttgcaggaaaaagtcgtgctcacggggttccacgccaatccgttgccggcgatcaaaggcgccaaaatggtcgcgctcagctctgacagcgaaggtttgccaaccgtcttgatcgaagcgctgatttgccatacgccgatcgtcagcaccgcctgtccgggcggcgtggccgaaatcatgtcgggagcattgcggccttatctggcggaaatgaacgaacaggcgttggcggaaaaaatgcgtctggcatggcaaacgccgccgcaaatcacagcagagatgtacagtaaattcgattacgaaaagattctcgataaatatttatcgttggcggagtga

SEQ ID NO: 5950 - protein, 366 aa, Serratia marcescens
MKKHILLIIDGLPGGGAENVTLTLAKGFQQRGCAVTLLSLSARLDYEIPTGVNYIVDHDTNNGPFRKTHELSRRAASMDRLLPNLFAELGKPALVISHLHKTDRIVVRSRVLKECNVWYCIHGMFSRTYLGNKTGFSRWLKQKKVQKVYRNRKVITVSEAIGADLIEQTGIRPEKLITIYNPFNIKEIENRAAQKNLFADEDYILHVGRFHQVKRHDRLLAAFALADLPAKLVLIGQGEAAVTHAIQEKITALNLQEKVVLTGFHANPLPAIKGAKMVALSSDSEGLPTVLIEALICHTPIVSTACPGGVAEIMSGALRPYLAEMNEQALAEKMRLAWQTPPQITAEMYSKFDYEKILDKYLSLAE

SEQ ID NO: 5951 - DNA, 633 bp, Acinetobacter baumannii
  misc_feature (335)..(335): n is a, c, g or t
atgcagattcgtcaatttcaagcacaacgtatgcaagcgcctcgcgattttaccccaattgaaaatactccgatttgtgtagaaattggagcaggcaaaggtaaacatgctttgctatttagttggcaaaatcctcagcacacgttatatgcaattgaacgaactagagaaaaattcttggccatgcaaaagcagcatggtttggagccaagagataatttaatccctgtgcatgcagatgctttaccttgggttgtacatgctctatatcctgctcaagtagaacatttctttatcctctatccgaacccagaacctcataatccggcacaacnctggttgaacatgccattttttgagttcctgttatcacgcctgaaaacaggtggaacgattacattggcaagtaatattcctgaatatattgaagaagctgaacaacagttattaaacgtgtggaagctgccttaccaaaaagaaaaaattgcgcaaacttctgcacgtactcattttgaaattaaatatttagagcgtggcgagctttgtcagcagcttattatgaccaagcctgaaggttataacactcgttttgatgagtttgcaccgctacaagggcaaatacatgtcgaataa

SEQ ID NO: 5952 - protein, 210 aa, Acinetobacter baumannii
  misc_feature (112)..(112): Xaa can be any naturally occurring amino acid
MQIRQFQAQRMQAPRDFTPIENTPICVEIGAGKGKHALLFSWQNPQHTLYAIERTREKFLAMQKQHGLEPRDNLIPVHADALPWVVHALYPAQVEHFFILYPNPEPHNPAQXWLNMPFFEFLLSRLKTGGTITLASNIPEYIEEAEQQLLNVWKLPYQKEKIAQTSARTHFEIKYLERGELCQQLIMTKPEGYNTRFDEFAPLQGQIHVE

SEQ ID NO: 5953 - DNA, 1248 bp, Acinetobacter baumannii
  misc_feature (575)..(575): n is a, c, g or t
atgaccagtctaaattcgtcctatgggcgctctcaagcggttcctttatctgtatttgagcagtcaaaagacgcacatattattcgttctgatgaagaggcaatagaggttgccaagcaacttgctcaagagtttgcccaagaagcatcagatcgagatagagagcgccgtctacccttaaatgaaattcaacagttctcacaaagtggcttgtgggccattacagtacctaagcaatttggtggggcgcaagtcaagtatcgaactttagcggaagtgatcaaaacaattgcgagtgttgacccttctcttgctcagttgcctcaaaaccacttggcttttattgaacatttaagactagatgcgaaacctgaacagcaacagttcttctttaacttggtgttaagaggaattcgttttggcaatgcattttccgaaaaacacagtaagacagtcgcggacctcacgactaaacttcaaaagaccgagcatggttatgaaattaatggcaagaaattctttgcaacgggtgccttgctcgcacattggattccaattgttgctataaatgaacnagggcaaccttatgctgcacttgtgccacgtgaaacatctggggtcaatattattaatgactggtctggttttggacaacgtactacagctagcggcacggtagagctgaatcaggtgccagtacgtgaagaatatctagttccaatttaccaagcatttgagcgcccaacaccagcaggtgctatttctcagtttattcaggctgcggtcgatgccggtattgcacgtggtgcaattgaagaaacgattcaatatgttaaaaaccatagccgtgcatggattgattcaggtctagaaaaagccagtgatgacccttacaccattgcaaatattggtgacctaaaaatcaaactgcgtgcagcagaagcggtattggatttggctggagatgcaattgatcaggccattgccaacaccaccgaagaacatgtaaaccaagccactctattggttgccgaggcaaaagtactcaccacagaaattgctattttggcagccaataaactttttgagttatcgggtacgcgttctactttatctgaactcaaccttgaccgtcactggcgcaatgcccgtacccacactttgcatgaccctgtgcgttggaaatatcacattgttggtaactattatctcaatggggttcagccacctcgtcatgcatggagctaa

SEQ ID NO: 5954 - protein, 415 aa, Acinetobacter baumannii
  misc_feature (192)..(192): Xaa can be any naturally occurring amino acid
MTSLNSSYGRSQAVPLSVFEQSKDAHIIRSDEEAIEVAKQLAQEFAQEASDRDRERRLPLNEIQQFSQSGLWAITVPKQFGGAQVKYRTLAEVIKTIASVDPSLAQLPQNHLAFIEHLRLDAKPEQQQFFFNLVLRGIRFGNAFSEKHSKTVADLTTKLQKTEHGYEINGKKFFATGALLAHWIPIVAINEXGQPYAALVPRETSGVNIINDWSGFGQRTTASGTVELNQVPVREEYLVPIYQAFERPTPAGAISQFIQAAVDAGIARGAIEETIQYVKNHSRAWIDSGLEKASDDPYTIANIGDLKIKLRAAEAVLDLAGDAIDQAIANTTEEHVNQATLLVAEAKVLTTEIAILAANKLFELSGTRSTLSELNLDRHWRNARTHTLHDPVRWKYHIVGNYYLNGVQPPRHAWS

SEQ ID NO: 5955 - DNA, 564 bp, Acinetobacter baumannii
  misc_feature (434)..(434): n is a, c, g or t
atgccatattcagatctctcatttcgcgcgttaagcgtgctccataagtctcgatatctttttaataaacatggttttcataacgtaggagtagaccgcattgtgcgagaagcagaggtgccaaaagcttcgttttataactatttccattctaaagaacggcttattgaaatgtgcctacactttcaaaaagacgtcttaaaagaacaagtgcgctcaatcatttacatacaaaaagatttaatcttgcgtgaaaaactcaagaagattttctttttacataccagtctgaatggttattaccacttgctatttagggctatttttgaaattgagaaactctatcccgcagcctatcaagtggtcgtacagtatcggcattggttaactactgaagtttataaattgcttttaactgtgaagaaagatgccangaaaagcgatagtgatatgtttttatttacgttagatggtgcgattattcagctgctagatgaaactaggggtgatacgagagaactgttatttacttatattttaaagggtatttttcttaaagattaa

SEQ ID NO: 5956 - protein, 187 aa, Acinetobacter baumannii
  misc_feature (145)..(145): Xaa can be any naturally occurring amino acid
MPYSDLSFRALSVLHKSRYLFNKHGFHNVGVDRIVREAEVPKASFYNYFHSKERLIEMCLHFQKDVLKEQVRSIIYIQKDLILREKLKKIFFLHTSLNGYYHLLFRAIFEIEKLYPAAYQVVVQYRHWLTTEVYKLLLTVKKDAXKSDSDMFLFTLDGAIIQLLDETRGDTRELLFTYILKGIFLKD

SEQ ID NO: 5957 - DNA, 1005 bp, Acinetobacter baumannii
  misc_feature (646)..(646): n is a, c, g or t
atgcaatcacttcaatcgttacaacctcgtatttcagtagccccaatgatggactggactacaaaggactaccgattctttgcacggttgtttaacccaaacgttgtgctttatacagaaatggtgactacgggcgcgattctatttggcgatgcgaaacgccatttggactataacgctcaagaacacccaatcgtattgcagcttggcggctcaaacccacaagagcttgccacttgcacaaaaatggctgaagactggggttacgatgaagtcaacctgaatgtaggctgcccaagtgaccgtgtacagaacaataaaatcggtgcatgtttaatggcagagccagacttggtcgctgaatgtattcacagcatgcaaaaagctgtcaacattccggtaacggtaaaacaccgtatcggtattgatgacatgcagtcttacgaagaaatgctgcactttgtagatactgtcgctgcaacaggttgtactcactttgttgtacatgcccgtattgcgatattgaaaggtttgtctccgaaagaaaaccgagaagtaccaccgctacgctatgaagatgtttaccgtttaaagcaagaacgcccgcatctgactattgaaattaatggtggtattaaaacttttnccgaaactcaagctcatttacagcacgttgacggcgtcatgattggccgtgaagcctatcacaacccttacttacttgctgagctcggccaactttggaacctagaagcaccagatcgtttcgatattatggaacaaatgctaccgtatattgaacaacgtctagctgaaggtgcacccctctctatcattacacgtcatattttaggtctattccaaaatttaccgggcgctcgcaaatggcgacaagctctaagtggtggaaatgcaaaaactttaactgacgtcgagaatgcaattcataatatgcaagctgctattatccgtactgaagagtatttaaaggaacaccaattttaa

SEQ ID NO: 5958 - protein, 334 aa, Acinetobacter baumannii
  misc_feature (216)..(216): Xaa can be any naturally occurring amino acid
MQSLQSLQPRISVAPMMDWTTKDYRFFARLFNPNVVLYTEMVTTGAILFGDAKRHLDYNAQEHPIVLQLGGSNPQELATCTKMAEDWGYDEVNLNVGCPSDRVQNNKIGACLMAEPDLVAECIHSMQKAVNIPVTVKHRIGIDDMQSYEEMLHFVDTVAATGCTHFVVHARIAILKGLSPKENREVPPLRYEDVYRLKQERPHLTIEINGGIKTFXETQAHLQHVDGVMIGREAYHNPYLLAELGQLWNLEAPDRFDIMEQMLPYIEQRLAEGAPLSIITRHILGLFQNLPGARKWRQALSGGNAKTLTDVENAIHNMQAAIIRTEEYLKEHQF

SEQ ID NO: 5959 - DNA, 408 bp, Acinetobacter baumannii
  misc_feature (53)..(53): n is a, c, g or t
atgaacaaagaaatttttaaaatcataaatccttctactttatatgacccaanacctaacgcttatagtcatgtcgctgtagtaagtaattttaacaatattattcatattgcaggtcaaggtggcgaagaccaacaaggtcaattaagttctcatttcagtgaacaagtcctacaagcatttgaaaatattaactatgcgttagtggctgccaatgcagagcttacggatatcgctgttttaagaattctagttgttgaccattcggtagaaaaacatgagattttgattaaaattatgaaggatttatggaaaaatcatccttttccagcctgcacactcattcctgtgccgcgacttgcactagaacatatgctcattgaagtcgaagcaacggcatacacttaa

SEQ ID NO: 5960 - protein, 135 aa, Acinetobacter baumannii
  misc_feature (18)..(18): Xaa can be any naturally occurring amino acid
MNKEIFKIINPSTLYDPXPNAYSHVAVVSNFNNIIHIAGQGGEDQQGQLSSHFSEQVLQAFENINYALVAANAELTDIAVLRILVVDHSVEKHEILIKIMKDLWKNHPFPACTLIPVPRLALEHMLIEVEATAYT

SEQ ID NO: 5961 - DNA, 867 bp, Acinetobacter baumannii
  misc_feature (180)..(180): n is a, c, g or t
atgaattttgatcgtaatactcctattgcttttttaggcataggacttatgggaagccgtatggcaagccgtcttatacaagccggctttcaggtcgcagtatggaatcgaacagcatctgcttgtgaagaacttattgatattggcgcgcatgcactcgatctttccaacatcggacantaccctctcattttgacttgcctagccgacgataaagctgtgcaagcagtatttgatcaaattcaaacaaacttaaaagcgggtcaggtcattgtcgacttctcaagtctctctgttgctgcgacaaaagcacttgctcaggctgctgcttcacaagatgtgatatggattgactcccctgtttcaggcggtacagctggggcagaacaaggcacgctagtcatttttgcaggtggcgatgctcaaactattgaagctttaagtcctgtttataatgttctttcccaacgtgtcacacgaatgggagatacaggcacaggacaagcaactaaaatttgcaatcaactcattgtggcagcaaacagcgccctgattgccgaagcagttgcactggcagaccgcgcgggcgtagataccactttactcgctcctgccctagctggcggatttgccgactcaaaaccttttcaaatactggcaccacgtatggcgactcatactttcgaacctgttcagtggaaagttcaaacgttatcgaaagaccttaacaacgcagtaacattggctaacaatgttaatttagacatccccgttgcacaaaaagctctattacagctacaaactcaccaaaaaaatggctttgctgagaaagatttagctactatgattcaagtagtagagcaataa

SEQ ID NO: 5962 - protein, 288 aa, Acinetobacter baumannii
  misc_feature (60)..(60): Xaa can be any naturally occurring amino acid
MNFDRNTPIAFLGIGLMGSRMASRLIQAGFQVAVWNRTASACEELIDIGAHALDLSNIGXYPLILTCLADDKAVQAVFDQIQTNLKAGQVIVDFSSLSVAATKALAQAAASQDVIWIDSPVSGGTAGAEQGTLVIFAGGDAQTIEALSPVYNVLSQRVTRMGDTGTGQATKICNQLIVAANSALIAEAVALADRAGVDTTLLAPALAGGFADSKPFQILAPRMATHTFEPVQWKVQTLSKDLNNAVTLANNVNLDIPVAQKALLQLQTHQKNGFAEKDLATMIQVVEQ

SEQ ID NO: 5963 - DNA, 1002 bp, Acinetobacter baumannii
  misc_feature (400)..(400): n is a, c, g or t
atggcgcttaatcagatttggaaacaacaacttacacttgtgacctatggtaacgaatacctacgtcagaatttaagttttagccaatggcgacaacatcatatttttgaccaacatagttttcaatttcgtgacttaatttcacaacatttacttgctcaacatttccaagtttggttagaagcactcaaaaaacaagggacgactcaaatctctcttcacctatctactattttaaatgaagagcaaaacccgaatagtaatgtcgaacttttaccttatactcattttattgtaagtcatcaaaacaataagaaaatcgcatggatttttggacatgagcttgccgaatggtacagcagcgataacgagtttgagccgcctctgactcaacgcagcnatttacgcttagagactttctggcgttttgaattgaatgaaaaattatctaaaaaagttgaagctgacttaaaagcacctcaatgggatgaaattgcaaactttatggaaactgagttatttcgaagtaagtatgcagcaggttttgaagaaccagaatttcagaaaaaatattttgatgggtcaacacatcaaatttcggtagagcatcaaccaactcttgctcttattcctgaaagctacccagcagattgtgcacatcaactcctctaccgcactcaggctttatcagattatttagagcagaaaaaacgcaccgcaaatgatcctttaggggaagacttagaccaagaacaaattattaacttaagaaactttacccacaaaactgacgacctatttgcaaaacttattgtgaaagcagcaaatcattatcaaacagctcaattaaaacctgttgagaaaccttctccttttgatgcaacgaatgagtccgcagctcatttaaaagtacctcatcacaaagctggaggaacaggggtaatcaagcttattgttctgacaatcattatttgtgctttagcctattattttggtctttaa

SEQ ID NO: 5964 - protein, 333 aa, Acinetobacter baumannii
  misc_feature (134)..(134): Xaa can be any naturally occurring amino acid
MALNQIWKQQLTLVTYGNEYLRQNLSFSQWRQHHIFDQHSFQFRDLISQHLLAQHFQVWLEALKKQGTTQISLHLSTILNEEQNPNSNVELLPYTHFIVSHQNNKKIAWIFGHELAEWYSSDNEFEPPLTQRSXLRLETFWRFELNEKLSKKVEADLKAPQWDEIANFMETELFRSKYAAGFEEPEFQKKYFDGSTHQISVEHQPTLALIPESYPADCAHQLLYRTQALSDYLEQKKRTANDPLGEDLDQEQIINLRNFTHKTDDLFAKLIVKAANHYQTAQLKPVEKPSPFDATNESAAHLKVPHHKAGGTGVIKLIVLTIIICALAYYFGL

SEQ ID NO: 5965 - DNA, 1002 bp, Acinetobacter baumannii
  misc_feature (787)..(787): n is a, c, g or t
atggcgcttaatcagatttggaaacaacaacttacacttgtgacctatggtaacgaatacctacgtcagaatttaagttttagccaatggcgacaacatcatatttttgaccaacatagttttcaatttcgtgacttaatttcacaacatttacttgctcaacatttccaagtttggttagaagcactcaaaaaacaagggacgactcaaatctctcttcacctatctactattttaaatgaagagcaaaacccgaatagtaatgtcgaacttttaccttatactcattttattgtaagtcatcaaaacaataagaaaatcgcatggatttttggacatgagcttgccgaatggtacagcagcgataacgagtttgagccgcctctgactcaacgcagcgatttacgcttagagactttctggcgttttgaattgaatgaaaaattatctaaaaaagttgaagctgacttaaaagcacctcaatgggatgaaattgcaaactttatggaaactgagttatttcgaagtaagtatgcagcaggttttgaagaaccagaatttcagaaaaaatattttgatgggtcaacacatcaaatttcggtagagcatcaaccaactcttgctcttattcctgaaagctacccagcagattgtgcacatcaactcctctaccgcactcaggctttatcagattatttagagcagaaaaaacgcaccgcaaatgatcctttaggggaagacttagaccaagaacaaattattaacttaagaaactttacccacaaanctgacgacctatttgcaaaacttattgtgaaagcagcaaatcattatcaaacagctcaattaaaacctgttgagaaaccttctccttttgatgcaacgaatgagtccgcagctcatttaaaagtacctcatcacaaagctggaggaacaggggtaatcaagcttattgttctgacaatcattatttgtgctttagcctattattttggtctttaa

SEQ ID NO: 5966 - protein, 333 aa, Acinetobacter baumannii
  misc_feature (263)..(263): Xaa can be any naturally occurring amino acid
MALNQIWKQQLTLVTYGNEYLRQNLSFSQWRQHHIFDQHSFQFRDLISQHLLAQHFQVWLEALKKQGTTQISLHLSTILNEEQNPNSNVELLPYTHFIVSHQNNKKIAWIFGHELAEWYSSDNEFEPPLTQRSDLRLETFWRFELNEKLSKKVEADLKAPQWDEIANFMETELFRSKYAAGFEEPEFQKKYFDGSTHQISVEHQPTLALIPESYPADCAHQLLYRTQALSDYLEQKKRTANDPLGEDLDQEQIINLRNFTHKXDDLFAKLIVKAANHYQTAQLKPVEKPSPFDATNESAAHLKVPHHKAGGTGVIKLIVLTIIICALAYYFGL

SEQ ID NO: 5967 - DNA, 1545 bp, Acinetobacter baumannii
  misc_feature (363)..(363): n is a, c, g or t
atggcaactgacgagagccactttttaactgtaggagagagccaattgcgtagtttacttggagatcatttgctgcaacgactccaacaggacactgaagggaaactacatcaacgccttttccgttgcctgcgtggtgccattattgatggagtgatccagccgaagactcgtctacctgcatcacgcgatttagccagtgaaattcatgtttcgagaaataccgttcttagtgcctacgaacaactacaggccgaaggctatttagaagcacggacaggacatggcacatgggttgccgaaaagttgccagagagttttttaaatacacaaaacaagaaaaaagtagtttctagcccaaanattcaaagttcttacgccctctcacagcgtggctcaaacttattgggctatgccgcagcctcgccacatcaatggggagcctttgttccgggagcacccgatgttaccgagtttccacatcatatttttagtcgtattcaagcacgcttaagccgcgaaccggacattaaccgtctaatttatagcaatgcaggtggatgcatagagcttcgaagtgcattggcagattacttacgtgttgcgcgttcagtccagtgcgatgcggaccagattattattaccgaaggcattcatcaagccattgatttagtctcacgtgcactgagtgatatgggagataaagtctggattgaagatcccgcttattggggaatgcgtaatacgttacggattaatggcctcgatattcagccgatgcctgtcgatgctgaaggcattattcctgaagaaaatccggcagtaccgcctaaactcatttttgtcacaccatcacatcaatatccgcttggctcacatttaagccttgatcgtcgcagacaattgattcagattgcacgtcagcacaatagctggattgtagaagatgactatgacagtgagttccgtttctcgggccagccttatccatctttgcaaggcttagaaaataatgcacctgttttatatatgggcacgtttagtaaaactatttacccatctttaagaattggctatttggtcgtccctaagccgttattttcaccgctacgtattgttgcggccgaactttatcgtggtgggcacttgcttgagcaaaaagccctcgctgaatttattcgtgaaggccattatgaagcgcatattcgccgtatgcgcctgctctatggtaaacgccgcgattacttggtgagcttaattcaacgctatcttggccccgaatttattcatgaatatgatgaagcagcagggttacatctggttttaaaactaccgaactcttgcgatgatgtcgccattgcagccacagcacttgaacgtggcgtcaaagttcgcccactttcacaatactacatgcaatcacatgcacatgcagagcgcggactgctgatgggctttgcctgtgtaaatgaaaaagacatggtgatggcttttggtgtcttgctccagtgcttacgtgaagcaggtgtacccacactgaattga

SEQ ID NO: 5968 - protein, 514 aa, Acinetobacter baumannii
  misc_feature (121)..(121): Xaa can be any naturally occurring amino acid
MATDESHFLTVGESQLRSLLGDHLLQRLQQDTEGKLHQRLFRCLRGAIIDGVIQPKTRLPASRDLASEIHVSRNTVLSAYEQLQAEGYLEARTGHGTWVAEKLPESFLNTQNKKKVVSSPXIQSSYALSQRGSNLLGYAAASPHQWGAFVPGAPDVTEFPHHIFSRIQARLSREPDINRLIYSNAGGCIELRSALADYLRVARSVQCDADQIIITEGIHQAIDLVSRALSDMGDKVWIEDPAYWGMRNTLRINGLDIQPMPVDAEGIIPEENPAVPPKLIFVTPSHQYPLGSHLSLDRRRQLIQIARQHNSWIVEDDYDSEFRFSGQPYPSLQGLENNAPVLYMGTFSKTIYPSLRIGYLVVPKPLFSPLRIVAAELYRGGHLLEQKALAEFIREGHYEAHIRRMRLLYGKRRDYLVSLIQRYLGPEFIHEYDEAAGLHLVLKLPNSCDDVAIAATALERGVKVRPLSQYYMQSHAHAERGLLMGFACVNEKDMVMAFGVLLQCLREAGVPTLN

SEQ ID NO: 5969 - DNA, 1815 bp, Acinetobacter baumannii
  misc_feature (1799)..(1799): n is a, c, g or t
atgaaaaagcttatttctcaggcaattatttattttctagtagccgctacttttgtattgagtcagtttgtctttgcagaagataagttattgtcacccgaacaggctttttcattttcggttgaatcgccacaatcgcataccgcaaagttatcgtggcagattcagccgaattattatttatatctgcataaatttaccgtacaacagggcaatcagcctttaactttaaatttgcctaaagcagtttctcaatatgatgagaactatggccaaagccaagtttattaccatcaagtcaacttccagattaaaaccaagccttcagagcactacactgtaacttggcaaggctgtgccaaagaccgtatttgttatcctccacaaactattgagtttcaaactgacgcagatggtctggtcggtctgcaaaatcaggctggtgcagcaacaaaacgcttattagatttggcaaatacccaagcatcaagctctacggagtctttagaaaatcagagttcagctactcaagctgaaggagctgctccagagattgcccaagatcaggtttggtcagctaagttaattgaacactcgctttggtatggtgttttattatttttaggtttaggcatgctgcttgcatttacgccatgttctttaccaatgctgccgattttaacttcattaattatccgagatcacaaaggtttaaaagcttggacgattgcacttacttttgtgtgtagtatggcattggtctatgcaggtctaggcttgattgcttcttcagcgggtttaaatttccaacgctggctacaacagcctgctactcttattgcgtttagtttgttgtttgtggtttttgcactaaatctgtttgggctttttgagcttcggttaccgcaaacttggttaaatcgacttgatcgtattcagtctatgcaacaaggtggcactttagtgggtgctggagtcatgggggtggtttctgcgctcttggttggcccatgcatgactgcgcctttggctggaactttattatttatttctcaaacccagaaccaatggcaaggtgctttgcttttattctgtctcggttttggcatgggaatacctttactcatcgcgagtgttttaggtgcaaagttcttacctaaagcgggcgactggatgcatcagattaaagtgatttttgcttttctgatgttggggttaagcctttatttcatccgccctttattaccagattgggggatgcaagcatttagttttgtacttgggttggcttttattatctatgcgctgtatcagttcttttggaaaaaaggacagttacagtggctttatgcgctcctacttttattggtaacgccatttgtggtttataaccagtatcaacatattcaaaatcgtagcttacaaaattctgagcatatggctgagtggcatgtggcgaccacggcagcagactttcaaaagattttagcagcagctcctgctgatcgggctattgttgttgatgtctatgctgattggtgcgtggcttgtcagcctattgaacatcgtattttaaaatcacctgaggttcagacggctcttgtgccttactatctcattaaacttgatttgagccattatgaccagtcacatgaagcattgctcaaacaatggaatattcttgggccacctacgtatctctttttaaacaagcaacagcaagaaattcgttctttacgtttaacaggcgcatttagtcagcaagagcttttacaacagctaggaagcttatcaaaagntaaagattcaaattga

SEQ ID NO: 5970 - protein, 604 aa, Acinetobacter baumannii
  misc_feature (600)..(600): Xaa can be any naturally occurring amino acid
MKKLISQAIIYFLVAATFVLSQFVFAEDKLLSPEQAFSFSVESPQSHTAKLSWQIQPNYYLYLHKFTVQQGNQPLTLNLPKAVSQYDENYGQSQVYYHQVNFQIKTKPSEHYTVTWQGCAKDRICYPPQTIEFQTDADGLVGLQNQAGAATKRLLDLANTQASSSTESLENQSSATQAEGAAPEIAQDQVWSAKLIEHSLWYGVLLFLGLGMLLAFTPCSLPMLPILTSLIIRDHKGLKAWTIALTFVCSMALVYAGLGLIASSAGLNFQRWLQQPATLIAFSLLFVVFALNLFGLFELRLPQTWLNRLDRIQSMQQGGTLVGAGVMGVVSALLVGPCMTAPLAGTLLFISQTQNQWQGALLLFCLGFGMGIPLLIASVLGAKFLPKAGDWMHQIKVIFAFLMLGLSLYFIRPLLPDWGMQAFSFVLGLAFIIYALYQFFWKKGQLQWLYALLLLLVTPFVVYNQYQHIQNRSLQNSEHMAEWHVATTAADFQKILAAAPADRAIVVDVYADWCVACQPIEHRILKSPEVQTALVPYYLIKLDLSHYDQSHEALLKQWNILGPPTYLFLNKQQQEIRSLRLTGAFSQQELLQQLGSLSKXKDSN

SEQ ID NO: 5971 - DNA, 1197 bp, Acinetobacter baumannii
  misc_feature (790)..(790): n is a, c, g or t
ttgattagaaaaagtaattctttattaaaaattttatttagcagtatttgtttgatatctggttctgctatggctgctccaattacagatttgagtaagcaaattgtgagtgaaaaaccgggctcaatactttctatagcgcaacaagatgtgacggatttatttcctcatgcagatcagcgcttattagtaaattatcgtagtcgaggtgtgaataacgagcctatcgttgcctcagcgtttattttattaccgaaaggaacaccaccaaaaaatggctggcccgtactagcttgggcgcatggtacaacaggagtagccgatacttgtgcaccttcgggtgattatgccggtggaccagttcattcatatcaggaagttgcttcaaaagcgttagatggttggcttgcacgaggctatgcagtagccgcacctgattatcaaggtctgggtactttaggtgcacatccttatatgaatgcaaagagccaattgcatacagtagtagatgcagtgcgggcgttacatatgcttaagccaaaagattttaataaacagtggttggtgatggggcatagccaaggcggtgctgctgctattaccgtggcggcttatggtcaaaaagatgctcccgaactagatttaaaaggggcaattgctcttgcgccaggtggctatcaatatgaaggcattgcagaatatgtgttgagtcatccaaacccagaaccaagtgtggcagcatttttcccgattgtattattgggagcgcaagcagcagagccaagtattnttcctgagaatttagtcagtccagaaatgggcaatgtgctgactcaagcacgtagccgctgtttatctgaacttcaatctgatttgaagaaatctccttctagcatatttcgacctaatgcagatttaaaacctcttttatcttatttaaaacagcagtctattgaaaatatggtgccgactgtaccgttaatgattgttcagggttctaaagatcatttagttgaccctagaggaacatatgcttattaccaacagctatgtaaatcaaaaaaaccaataatttatcaaacgattgatggtggagatcatcgcgatgcactacgtcagagtcatacttttgccactgactttttaaatgtcatagagaaaaatcagacaaaatcgtattgctcaaatcttaagtaa

SEQ ID NO: 5972 - protein, 398 aa, Acinetobacter baumannii
  misc_feature (264)..(264): Xaa can be any naturally occurring amino acid
MIRKSNSLLKILFSSICLISGSAMAAPITDLSKQIVSEKPGSILSIAQQDVTDLFPHADQRLLVNYRSRGVNNEPIVASAFILLPKGTPPKNGWPVLAWAHGTTGVADTCAPSGDYAGGPVHSYQEVASKALDGWLARGYAVAAPDYQGLGTLGAHPYMNAKSQLHTVVDAVRALHMLKPKDFNKQWLVMGHSQGGAAAITVAAYGQKDAPELDLKGAIALAPGGYQYEGIAEYVLSHPNPEPSVAAFFPIVLLGAQAAEPSIXPENLVSPEMGNVLTQARSRCLSELQSDLKKSPSSIFRPNADLKPLLSYLKQQSIENMVPTVPLMIVQGSKDHLVDPRGTYAYYQQLCKSKKPIIYQTIDGGDHRDALRQSHTFATDFLNVIEKNQTKSYCSNLK

SEQ ID NO: 5973 - DNA, 1197 bp, Acinetobacter baumannii
  misc_feature (17)..(17): n is a, c, g or t
ttgattagaaaaagtanttctttattaaaaattttatttagcagtatttgtttgatatctggttctgctatggctgctccaattacagatttgagtaagcaaattgtgagtgaaaaaccgggctcaatactttctatagcgcaacaagatgtgacggatttatttcctcatgcagatcagcgcttattagtaaattatcgtagtcgaggtgtgaataacgagcctatcgttgcctcagcgtttattttattaccgaaaggaacaccaccaaaaaatggctggcccgtactagcttgggcgcatggtacaacaggagtagccgatacttgtgcaccttcgggtgattatgccggtggaccagttcattcatatcaggaagttgcttcaaaagcgttagatggttggcttgcacgaggctatgcagtagccgcacctgattatcaaggtctgggtactttaggtgcacatccttatatgaatgcaaagagccaattgcatacagtagtagatgcagtgcgggcgttacatatgcttaagccaaaagattttaataaacagtggttggtgatggggcatagccaaggcggtgctgctgctattaccgtggcggcttatggtcaaaaagatgctcccgaactagatttaaaaggggcaattgctcttgcgccaggtggctatcaatatgaaggcattgcagaatatgtgttgagtcatccaaacccagaaccaagtgtggcagcatttttcccgattgtattattgggagcgcaagcagcagagccaagtattattcctgagaatttagtcagtccagaaatgggcaatgtgctgactcaagcacgtagccgctgtttatctgaacttcaatctgatttgaagaaatctccttctagcatatttcgacctaatgcagatttaaaacctcttttatcttatttaaaacagcagtctattgaaaatatggtgccgactgtaccgttaatgattgttcagggttctaaagatcatttagttgaccctagaggaacatatgcttattaccaacagctatgtaaatcaaaaaaaccaataatttatcaaacgattgatggtggagatcatcgcgatgcactacgtcagagtcatacttttgccactgactttttaaatgtcatagagaaaaatcagacaaaatcgtattgctcaaatcttaagtaa

SEQ ID NO: 5974 - protein, 398 aa, Acinetobacter baumannii
  misc_feature (6)..(6): Xaa can be any naturally occurring amino acid
MIRKSXSLLKILFSSICLISGSAMAAPITDLSKQIVSEKPGSILSIAQQDVTDLFPHADQRLLVNYRSRGVNNEPIVASAFILLPKGTPPKNGWPVLAWAHGTTGVADTCAPSGDYAGGPVHSYQEVASKALDGWLARGYAVAAPDYQGLGTLGAHPYMNAKSQLHTVVDAVRALHMLKPKDFNKQWLVMGHSQGGAAAITVAAYGQKDAPELDLKGAIALAPGGYQYEGIAEYVLSHPNPEPSVAAFFPIVLLGAQAAEPSIIPENLVSPEMGNVLTQARSRCLSELQSDLKKSPSSIFRPNADLKPLLSYLKQQSIENMVPTVPLMIVQGSKDHLVDPRGTYAYYQQLCKSKKPIIYQTIDGGDHRDALRQSHTFATDFLNVIEKNQTKSYCSNLK

SEQ ID NO: 5975 - DNA, 1365 bp, Acinetobacter baumannii
  misc_feature (941)..(941): n is a, c, g or t
atgtcaactactgtcattattcttgctgcaggcaaaggaacgcgaatgcgttctcagctccctaaagtactacaacctttagctggtcgcccgctactaggacatgttattaaaacagcaaaacaactattagcagaaaacatcattaccatttatggacatggtggcgatcacgtaaaaaagacattcgcacaagaaaatattcagtgggttgaacaagcagaacagttagggaccggtcatgctgtacagatgactttacctgtacttcctaaagacggcatttcattaattttatacggtgatgttcctttagtccgtcaaacaacacttgaacaactgattgaagtatcaaataaaaccggtattggcatgattactttacatgtcgataacccaacaggttatggccgtattgtccgccaagacggtaaaatccaagcaattgttgaacataaagacgcaaccgaagctcagcgtcaaattcaagaaatcaacacaggtatttactgtgtcagcaatgcaaaactgcatgagtggttgcctaagctttcaaatgaaaatgcacaaggcgaatactatttaactgatatcgttgcgatggctgttgctgatggtttagaaatcgcctcaattcaaccagagctcgcatttgaagttgaaggtgtaaatgaccgcgtgcaacttgcagcacttgagcgtgaatttcagaagcaacaagcaaaagaacttatgcagcaaggcgtaacttttgctgatcctgcacgttttgatttacgtggtacagtaaaagttggtcatgatgtccgtattgatgtgaatgtcattattgaaggcgactgtgaactcggtgactttgtagaaatcggtgcgggctgtattttaaaaaatacaaccattgcagcgggcactaaagtccaagcgtacagcgtttttgatgnagcagttgttggggaaaatacccaaattggtccattcgcacgcttacgtccaggtgctaaattggcaaatgaagtacatatcggcaactttgttgaagtcaaaaatacaacgatcggtctaggcagtaaagctaaccatttcacctatttaggtgatgccgagatcggtgctgaatcaaatattggggcaggtacaatcacctgcaattatgatggtgcaaataaacacaaaaccactattggcgatgcagtttttatcggttctaatagctcgctggttgcgcctgtgactattggtaatggagcaacagtcggtgcgggttctgtgattacgaaagatgtggctgaacaaagtctctcctttgagcgtgctcaacaaatttctaaagcaaattatcaacgtccccaaaagcttaaaaaataa

SEQ ID NO: 5976 - protein, 454 aa, Acinetobacter baumannii
  misc_feature (314)..(314): Xaa can be any naturally occurring amino acid
MSTTVIILAAGKGTRMRSQLPKVLQPLAGRPLLGHVIKTAKQLLAENIITIYGHGGDHVKKTFAQENIQWVEQAEQLGTGHAVQMTLPVLPKDGISLILYGDVPLVRQTTLEQLIEVSNKTGIGMITLHVDNPTGYGRIVRQDGKIQAIVEHKDATEAQRQIQEINTGIYCVSNAKLHEWLPKLSNENAQGEYYLTDIVAMAVADGLEIASIQPELAFEVEGVNDRVQLAALEREFQKQQAKELMQQGVTFADPARFDLRGTVKVGHDVRIDVNVIIEGDCELGDFVEIGAGCILKNTTIAAGTKVQAYSVFDXAVVGENTQIGPFARLRPGAKLANEVHIGNFVEVKNTTIGLGSKANHFTYLGDAEIGAESNIGAGTITCNYDGANKHKTTIGDAVFIGSNSSLVAPVTIGNGATVGAGSVITKDVAEQSLSFERAQQISKANYQRPQKLKK

SEQ ID NO: 5977 - DNA, 1827 bp, Acinetobacter baumannii
  misc_feature (902)..(902): n is a, c, g or t
atgaaaaacagaaccttacattttgcttgtatcagtgttttattttggatgtctcattcttctaatgctgcaccccccgaaataaatacaaataccatcgaaaaatcacaatctaaaccaaatagtaatgtctctgttcgggtgaaagttttaaaccagcttttacaggaacagtgggaatatactttgaaaaatagtcctgaaactgcaaccgttttaggagatttacgctacaacaatcgatggactgagctttcaaaaaatcagatcgagaaagataaaaaaagtacgcaaaattttttaaaacgttttgaagcaattgatagcacagggttttcagtaactgatcaattaaataaagatttaatgatttatcagttgaaagaaacacttaaaaattatgatttgaaattatatgaaatgccttttaatcaaatgtgggggctacatttacaatttccgggatttattagttcgattccatttgataatgctaagcaatatcaagactatatttctcgtttaaaacaaattcctcttattcttgatcaaggtattcagttagcgaaacaaggacaaaaagatggcttgatgccaccgaaatatttaattgaaaaggtggcaaagcagattaatagtattgcagctcccgcaggggcagacagtgtttttgcttctccattaaagcaatttccaaaaaatatttcgaaagcagaacaagagcgtttaagccgtgaaatattacagactatagatcagaatgttcggcctgcctatcaaaaactcggtacgtttattcagaaagattacttaccctatggacgacagcacgagggtatatggagcttgccaaacggtgacgagctctatcgcttttatgtagaaaataatacgacaacctnggaaagccctgaaaatattcatcagctcggattaaaagaagttgctcgtatagaagcggaaatgctgaaaattgctaaagcacaaggcttcaatgatttaaaaagcttccaacaatctttaaaaacaaatcctgcggttttcccaaaatctcgtgaagaaattttagagatatatcgcgggtatattgcccaaatgcaaccagagttgccgaagctgtttggtttattacccaaaaataaagtcgaagttttgcctgtagagcaatatcgagaaaaagaagcggcaggtgccgagtatcaccaaggcacgcctgatggctcacgccccggacaagtatatgtaaatactggcgacttctctgaacgttccaaaatatcaatggaagcaactgcttaccatgaggcaattcccggccaccatatgcagattgatattgcccaaaacttgccaaatttgccgatgttccgtaagcaacccaaccacactgcctacattgaaggatgggcactttacgcagagcaactgggtaaagatgttggtttctataaagaccagctttcagactatggaagactctcgagtgagttgttccgtgcttgtcggttagtggtggacactggcgtacactataaaaaatggacccgtcagcaaatgattgattttatgcgagaacactcagctttagatgaacccgatattcaggcagaggcagaccgatatatcgctattcctgcacaagcattggcatacaaaatgggtcaactcaaaattttagagctacgggagcttgcaaaacaggagcttggagatcgttttgatatcaaaacgtttcatgacatgattttaaatgcaggaacactgcctttaaatatactggatgcccgtattaaaaattggattaaggaacaaaaagcggcagcttaa

SEQ ID NO: 5978 - protein, 608 aa, Acinetobacter baumannii
  misc_feature (301)..(301): Xaa can be any naturally occurring amino acid
MKNRTLHFACISVLFWMSHSSNAAPPEINTNTIEKSQSKPNSNVSVRVKVLNQLLQEQWEYTLKNSPETATVLGDLRYNNRWTELSKNQIEKDKKSTQNFLKRFEAIDSTGFSVTDQLNKDLMIYQLKETLKNYDLKLYEMPFNQMWGLHLQFPGFISSIPFDNAKQYQDYISRLKQIPLILDQGIQLAKQGQKDGLMPPKYLIEKVAKQINSIAAPAGADSVFASPLKQFPKNISKAEQERLSREILQTIDQNVRPAYQKLGTFIQKDYLPYGRQHEGIWSLPNGDELYRFYVENNTTTXESPENIHQLGLKEVARIEAEMLKIAKAQGFNDLKSFQQSLKTNPAVFPKSREEILEIYRGYIAQMQPELPKLFGLLPKNKVEVLPVEQYREKEAAGAEYHQGTPDGSRPGQVYVNTGDFSERSKISMEATAYHEAIPGHHMQIDIAQNLPNLPMFRKQPNHTAYIEGWALYAEQLGKDVGFYKDQLSDYGRLSSELFRACRLVVDTGVHYKKWTRQQMIDFMREHSALDEPDIQAEADRYIAIPAQALAYKMGQLKILELRELAKQELGDRFDIKTFHDMILNAGTLPLNILDARIKNWIKEQKAAA

SEQ ID NO: 5979 - DNA, 954 bp, Acinetobacter baumannii
  misc_feature (290)..(290): n is a, c, g or t
atggacaagaagttattttttaaacggtgtcacatgaatcacacatttaaatggcaaggccgacatgatggcgagggtgaggcacatcaacgtattcaccatataatgaacaccacccaacatgctgaatttgccctgattggttttagctctgatgaaggcgtaaaacgtaataaaggccgagttggtgctgccgacgcaccagatgcgattcgtacccaactggctaacttaccaattcatcgtccagtcagtattgtcgatttgggtacagtgacctgtgaatctgngaatttagagcaagcgcaaaccgagttggcagagcaagtcgcaaacagcttacaaaatggtttaaaaccgattgtattgggcggtggacatgaggttgcctttggcagctttagcggtctgttccaatatgtacaagcccacgcaccagataaaaaaataggcattattaattttgatgcccattttgatttgcgtgaagctgaacatgccacctctggaacaccatttttacaggcagctcgactttcagaacagcatcaaaaacaatttaattatttatgtattggggtcgctaaccatgccaatactaaagttttgtttgatacagccgatgctttaaattgtccatatttacgcgatcatgaggttaatatttttaacctaaacaacgtgctcgcagcgattgatgcttttattgaaaaagtagactgtttgtacgttacgattgatttagatgtcttcgcggctgcggttgcaccgggggtcagtgcaccagctgtcaaaggaattgatttagccacttttgaagcgatttttaagcatattcgagagactggaaaaattaaacttttagatattgctgaatgcaatccaaaatttgatttagacaatagaacagcaaaactggctgcctatattgtttatcaatatttgttttcttga

SEQ ID NO: 5980 - protein, 317 aa, Acinetobacter baumannii
  misc_feature (97)..(97): Xaa can be any naturally occurring amino acid
MDKKLFFKRCHMNHTFKWQGRHDGEGEAHQRIHHIMNTTQHAEFALIGFSSDEGVKRNKGRVGAADAPDAIRTQLANLPIHRPVSIVDLGTVTCESXNLEQAQTELAEQVANSLQNGLKPIVLGGGHEVAFGSFSGLFQYVQAHAPDKKIGIINFDAHFDLREAEHATSGTPFLQAARLSEQHQKQFNYLCIGVANHANTKVLFDTADALNCPYLRDHEVNIFNLNNVLAAIDAFIEKVDCLYVTIDLDVFAAAVAPGVSAPAVKGIDLATFEAIFKHIRETGKIKLLDIAECNPKFDLDNRTAKLAAYIVYQYLFS

SEQ ID NO: 5981 - DNA, 1206 bp, Acinetobacter baumannii
  misc_feature (17)..(17): n is a, c, g or t
atgaaaaaactttggcnaaactgccatattgcgaccatgcaaaatgggcaatattcctacattgaagatgctgcaattgtcacagaagggcatctcatccactggattggaaaacaacaacaacttcctgccgacacttattccgaaacagttgacttaaatggcgcttgggtaaccccggggctcatcgactgtcatacgcatagcgtatttggtggcaaccgtagtgttgagtttgaaaagcgcttacaaggtgtgagttatgctgaaattgctgcaagcggtggcggcattgccagtactgttcgtgcaacacgtgaagcaagcgaagaacaattactaagctcagcacttaaacgtattcgctgtatgcaacaagacggtgtaacgaccatcgagattaagtctggttacggactgaattatgaaaatgaacgcaagatgcttcgtgtgattcgtcaaattggtgaagctttaccaatgacggtcaaaagtacctgcttagctgctcatgctttaccgccagagtacaaagaccaaagcgacgcttatatcgagcatatctgtacagaaatgctgcctaaactgcatgctgaaggtttagtcgatgcagttgatgctttctgcgagcatttagcattttcacctgctcaggttgaacgtgtttttaaaacggcacaatcattggggctacccgttaagcttcatgccgaacagctttcatcgctaggtggttcaagtttggcagcacgttatcatgctttgtcggctgaccatttagagtacatgaccgaagatgatgtcaaagccatggcagagtcgggcacggttgcagtgttattaccgggtgccttttatttattgcgtgaaacacaatacccaccgattgaaagcctcattaaacatggcgtgcgtattgcgctgtcgagtgatttaaatccgggtacatctccagcactttctttacgtttaatgctgaatatgggcagtacgttattccgtttaacgcctgagcaagcattagcaggtgtcactattcatgctgcacaagcgcttggtttagagcaaacacacggtagtttggagcagggtaaagtcgctgactttgtcgcttgggatattgagcatccatctgaaattgtttactggctgggcggagatttgcctaagcgagtcgttcagcatggacaagaagttattttttaa

SEQ ID NO: 5982 - protein, 401 aa, Acinetobacter baumannii
  misc_feature (6)..(6): Xaa can be any naturally occurring amino acid
MKKLWXNCHIATMQNGQYSYIEDAAIVTEGHLIHWIGKQQQLPADTYSETVDLNGAWVTPGLIDCHTHSVFGGNRSVEFEKRLQGVSYAEIAASGGGIASTVRATREASEEQLLSSALKRIRCMQQDGVTTIEIKSGYGLNYENERKMLRVIRQIGEALPMTVKSTCLAAHALPPEYKDQSDAYIEHICTEMLPKLHAEGLVDAVDAFCEHLAFSPAQVERVFKTAQSLGLPVKLHAEQLSSLGGSSLAARYHALSADHLEYMTEDDVKAMAESGTVAVLLPGAFYLLRETQYPPIESLIKHGVRIALSSDLNPGTSPALSLRLMLNMGSTLFRLTPEQALAGVTIHAAQALGLEQTHGSLEQGKVADFVAWDIEHPSEIVYWLGGDLPKRVVQHGQEVIF

SEQ ID NO: 5983 - DNA, 1305 bp, Acinetobacter baumannii
  misc_feature (751)..(751): n is a, c, g or t
atgagtcaggctacttcaaattcatcacgttttaacctgcgcgctcaagtcgtccagaccttgctaaaagttcagcaaggtcaatcgctcgctagtattttaaatacacagctgaatcaagtagcagagcgtgatcgtgcactatttcatgaacttgttttaggtacattgcgccaatggttcgcacttaagtcaattagcctgcctttactcagcaaacctttaaacaatgagacagtagaaacctgcctatacgttggcctttatcaagttttatgcacgcgtattgcagcgcacgctgccatctcggaaacagtcgatgcgactaaacaacttggtttccctgcactcagtggtattgttaatgcaattttgcgtcgagcaactcgtgaaactgatgactttcagcaaggtttacagcaagcacatggcttaccaagttggctttttaaacggttaaaaaaggattgggaagaacaaacagaagctctctgccaatcgttaaagcaagccgcacctttaactttacgggtgaaccagcgtcatattggtcgagatgcttatttagcaaaactacaaaggttagacattcaggcacgtgcgtgtttgttttccgaagctggtattgtccttgagcaatctgtacaaatcactcagttaccgggttttgaacaaggctggttctctgtacaagatgaacatgcacagctatgtgccaccttgttgcctgatttaaacaataaaacggttnttgatgcttgtgctgccccagggggtaaaacggctcatttgcttgaaaagtttaaaccagcacagctcatcgccattgatcaggacccaagccgtttagtccgcgtgactgaaaacttaaatcgcttagcactcgatcaaagccacacggaaattttggcagccgatgcaaccaagtggaatcctgttcaacctgtagattctatcgtacttgatgctccttgttctgcgacaggtgtgattcgacgtcatcctgacatacgcctattgcgccaatctagtgacatagcccaaaccattgagctacaaaagcagatcttagagcacatgtggcagcaactcaaagttggcggtacattgctttatatcacctgctcaattttaaaatctgaaaacgaacagcagatgattaacttcttcacagaacatcctgatgcaaaagaagtgaaaatcgaggcagattggggaattgaacaagttcatggcagacaactgttgccagaagcacaatctggtgatggattttattattgtaaaattcaaaagattacataa

SEQ ID NO: 5984 - protein, 434 aa, Acinetobacter baumannii
  misc_feature (251)..(251): Xaa can be any naturally occurring amino acid
MSQATSNSSRFNLRAQVVQTLLKVQQGQSLASILNTQLNQVAERDRALFHELVLGTLRQWFALKSISLPLLSKPLNNETVETCLYVGLYQVLCTRIAAHAAISETVDATKQLGFPALSGIVNAILRRATRETDDFQQGLQQAHGLPSWLFKRLKKDWEEQTEALCQSLKQAAPLTLRVNQRHIGRDAYLAKLQRLDIQARACLFSEAGIVLEQSVQITQLPGFEQGWFSVQDEHAQLCATLLPDLNNKTVXDACAAPGGKTAHLLEKFKPAQLIAIDQDPSRLVRVTENLNRLALDQSHTEILAADATKWNPVQPVDSIVLDAPCSATGVIRRHPDIRLLRQSSDIAQTIELQKQILEHMWQQLKVGGTLLYITCSILKSENEQQMINFFTEHPDAKEVKIEADWGIEQVHGRQLLPEAQSGDGFYYCKIQKIT

SEQ ID NO: 5985 - DNA, 726 bp, Acinetobacter baumannii
  misc_feature (62)..(62): n is a, c, g or t
atggctgcattgcttggtgtaaacatagaccatgttgctactttaagacaggcgcgcggtantgcttacccagaccctgtagaagctgctcttatttgtgaacaagcgggtgcagaggggattactttgcatttgcgtgaagatcgcagacatattcaagatgatgacgtacgccgtatgcgtccattattgaaaacacgtatgaatcttgaaatggccgtaactgatgaaatggttgagtttgcgaaagaaattcaaccacaacatgtgtgttttgtaccagaacgacgccaagaagttacaacagaaggcggtttagatgtagtgggtaactttgaaaaagttaaagctgcaactcaagctttagctgccattggttgtgatgtttcactctttattgatgctgattttgctcaaattgatgcagccattgcttgtggagcgcctactattgaattacataccggggcttatgcagatgcaacaacagagcaagaacaacaagaagaacttgctcgcattgtaaaaggtgtggaatacgcagcttcaaaaggtttggttgtaaatgctggtcacggtttgaatctgaaaaatattgctccaattgcggcaattccacaaattcatgagttaaatattggtcactcaattattgcggaaagtgtttttgttggactagtacaggcggtgaaagacatgaaaacagcgattcaggcagcaggataa

SEQ ID NO: 5986 - protein, 241 aa, Acinetobacter baumannii
  misc_feature (21)..(21): Xaa can be any naturally occurring amino acid
MAALLGVNIDHVATLRQARGXAYPDPVEAALICEQAGAEGITLHLREDRRHIQDDDVRRMRPLLKTRMNLEMAVTDEMVEFAKEIQPQHVCFVPERRQEVTTEGGLDVVGNFEKVKAATQALAAIGCDVSLFIDADFAQIDAAIACGAPTIELHTGAYADATTEQEQQEELARIVKGVEYAASKGLVVNAGHGLNLKNIAPIAAIPQIHELNIGHSIIAESVFVGLVQAVKDMKTAIQAAG

SEQ ID NO: 5987 - DNA, 906 bp, Acinetobacter baumannii
  misc_feature (875)..(875): n is a, c, g or t
atgaaaaaacagataccaattaaaataactgcttttattattttaattatatgtagtgtggtgggttatgcggggttgttcaaaaatcatgggcaacctcccattattgagggtattttctggcaacctgacaatgatactactcctcctaaaggaaactggcattacttaggaataaatacttttgttccccaatggtcagtcgttgaatctaaatcttggtggaaaaactccaacctccctcaatgggaaaaagccattgatttacaaaaaattaaacagcaaccttgggctaaaaatcttatattggggttagcaggtgaatataatgaacacgaagcgcgtgctaatgtcgttgctttgggagaaaaatctgcacaaattattcaagaacaaaatgatgcatctttaaaaggctattattttccagtagaagccgacccaacatggctaagagtaagtaccttaggacatgttttggaaaaattaccctctcctatttgggttagtgtttatagtggtgaaagtgaacctgaaaactacgatttatgggttaaaagctggcttcctcaacaagcaggcgtttttttccaagatggtgtaggtgtcggagtacgaactcccgaacaagctagacgtattttagatcaacttgaacagacacttggaaaagataaaacagttattgttttagaagcatttcgaaccaagaaaaatggtcaattccgtgcagcctatccttgggaaattatctctcaaattaaggcgtatgaagggaaaaaaatttatatttttgatggcccccactatatgggccgatggtccgtttatatagtcggtctatggtatcgactcgtttatggcagcacacccgncaccataaacgaatcagaaaactcaaaataa

SEQ ID NO: 5988 - protein, 301 aa, Acinetobacter baumannii
  misc_feature (292)..(292): Xaa can be any naturally occurring amino acid
MKKQIPIKITAFIILIICSVVGYAGLFKNHGQPPIIEGIFWQPDNDTTPPKGNWHYLGINTFVPQWSVVESKSWWKNSNLPQWEKAIDLQKIKQQPWAKNLILGLAGEYNEHEARANVVALGEKSAQIIQEQNDASLKGYYFPVEADPTWLRVSTLGHVLEKLPSPIWVSVYSGESEPENYDLWVKSWLPQQAGVFFQDGVGVGVRTPEQARRILDQLEQTLGKDKTVIVLEAFRTKKNGQFRAAYPWEIISQIKAYEGKKIYIFDGPHYMGRWSVYIVGLWYRLVYGSTPXTINESENSK

SEQ ID NO: 5989 - DNA, 1848 bp, Acinetobacter baumannii
  misc_feature (721)..(721): n is a, c, g or t
atgctaaaagatttgagtcaaaatttagggcaaatgaatgataaaaataacaacgtagaaaatttcttaaagcaaatttatgaaaatatttttgataaaaattccaatcgaacagcactcatttttgaagatcgtagcattagttatgctgaggtagggactcaggtcgccaaagttatgtatgcgctaagaaagcaagacttggcgacagggtcggtggtggcaatttgcctgagaaaaagtcctgagcatatttatacagctttagcatgtgcgctcactggcatcatttggctacctgtagatatggattctccgccatcgcgactgaactatttattgacgaatagtcgggcagatgttgtggtgagtgactcatccattgcaggtgttcgaaacctaaatattaatgaaattttatcggctacaactgagtatgaaccgagctttaatgccgaaatcaacagacgtccggcttattatttatatacttcgggaagtacaggaactccgaaatgtgtggtcctaaataatcaggccacagaaaacacgctacaacagacgatctcggaatggaaaattactactgacgatgtgattatggcggtaacaccgtttcaccatgatatgtcggtatttgatgtatttgcttcaatggcagtgggtgcaactttggtggttccatcttttgagcaaagtaaaaatgctgttgtctgggccnatttagtagatcgttgcaaggttacgatttggagcagtgtccctgccattgtcgatatgctgttcagtgtagcgcaaaaagtacaattacagtctttacgtttaattgcccaaggcggcgactatatcaagccttcacttatagcgaagttaagacaacaattacctaacgctcgtttattttcattaggtggacctaccgagaccacaatttggagtatatggcatgaaataaatgagcaagatcaggaaattattccgtatggaaaagctttagaaaataaccgttattttattttggatgaaaatctaaagccttgccaaatgggcgaggtcggtacgatgtatatggccggcctgaatttatctaatggttatttacttgatggggaaattaattataaagatttcgttgatattcaagtgagcgaaaatgaaactcaaactgcttttcgcatgagtgaccaaggatattttagggaagatggaaatattatttttgcgggacgtgaggaaggttatttaaaaataaaaggcgtgagaatctctgcggccgaggttgaaaatactttgacgaagaacccgtatatccataactgtgtggtgatcagttgtgtacatccaacgactgaaactcaagagttagtcgctatttacaccctagaaaataaatataaaactactcgcctaaatagccccgaattaaaaaacttcttaaaaatacatttgccgagttcacatattccttcgaaatatttggccgttgaaaccatacctttgacccgaaatggaaaaattgatcgtaaagctgtgcaagaaatcgctcaggggaaaatttatgtaacttctacgttgtctgcaaactcttctaaaacacagtcatcaatcgctgaggtgggggattcggttttatcggttttccgtgaatgcatcgctgacaaccaagctgaaaaaatggatattttttatagaagtgaaatattagatataggaattcgtccgaaacaactcatgagtattgctcagaaactttctcagaagcttaatacacaaattgatttttatacgctagttagctgcaaaacaattcaggatgtggtgaataaagtagagcagcaaataaaatag

SEQ ID NO: 5990 - protein, 615 aa, Acinetobacter baumannii
  misc_feature (241)..(241): Xaa can be any naturally occurring amino acid
MLKDLSQNLGQMNDKNNNVENFLKQIYENIFDKNSNRTALIFEDRSISYAEVGTQVAKVMYALRKQDLATGSVVAICLRKSPEHIYTALACALTGIIWLPVDMDSPPSRLNYLLTNSRADVVVSDSSIAGVRNLNINEILSATTEYEPSFNAEINRRPAYYLYTSGSTGTPKCVVLNNQATENTLQQTISEWKITTDDVIMAVTPFHHDMSVFDVFASMAVGATLVVPSFEQSKNAVVWAXLVDRCKVTIWSSVPAIVDMLFSVAQKVQLQSLRLIAQGGDYIKPSLIAKLRQQLPNARLFSLGGPTETTIWSIWHEINEQDQEIIPYGKALENNRYFILDENLKPCQMGEVGTMYMAGLNLSNGYLLDGEINYKDFVDIQVSENETQTAFRMSDQGYFREDGNIIFAGREEGYLKIKGVRISAAEVENTLTKNPYIHNCVVISCVHPTTETQELVAIYTLENKYKTTRLNSPELKNFLKIHLPSSHIPSKYLAVETIPLTRNGKIDRKAVQEIAQGKIYVTSTLSANSSKTQSSIAEVGDSVLSVFRECIADNQAEKMDIFYRSEILDIGIRPKQLMSIAQKLSQKLNTQIDFYTLVSCKTIQDVVNKVEQQIK

SEQ ID NO: 5991 - DNA, 2943 bp, Acinetobacter baumannii
  misc_feature (649)..(649): n is a, c, g or t
atgcaactggtaatcattttcatttgtttgtatgatgctgaaacaagattaatttgtcaaccgagttatcgttcaatgtgtgaattaacttcgatgcaagcggcctgctggtttggtcgctctggcaacgcaactttaggtggggttgctgcccatctctatgcagaatttgacggtcaatttattgatctacaaaaattacatttagcacttcaacgactttataaagaacaccctattttgagattaagtttgagtgccgatggcatcgcaaacatcatggctgagaaggctcaacagatattagaagtcgatgatttttcaaagcttagcgatcatgaaattgagcaaatgctcatgcaaaaacgggagcaatggacccatcaaaaacttgatttaagtcagggccagactgcaagattttctgtaagtgttcttaaaaataatatttttcgttttcatgtagatacggacatgattgctatagatccatccagcttcttgaatttaatggaagatctttctttgttttatgaagacccagaaatatcattctcccgtccgcctaatttttttgactggtatcaaaaagtacggacggaccctgacctaaaaaaattaagccaacgagaccgcttatggtggaaanaacgtctgcctcagattagccctgctccatctctacctttcattcatcaagaattcaaaacagcaaaaagtgatcgtttaagtacttggctatcgccaaaagaacgaacagcattacaacaacttgctagagaacaacgcattactgtgaccaatctgatattaggtctatttgcctatacgcttggtcatacaaccaaagatcacagcttccgattaaatattcctactttttggcgtgagccggttttaaaaaatgtcgaaggcactattggtgattttgctaatctagtcatccttgatgtcgatatgaaaggaataactaccttagccgcattctgcaaacaaatagcaaatcaaatgcttgagttattagagcattcacattattcgggtgtgaatgttctacgtgacctgtcccgttatcatggtagtgcacagattgctcccgtggtatttacagccgcgctcgacttagaaaatgataatttactttccgaacgtgtccgccgtgtttttggctcaatgaattgggtcatttcacaagggccgcaagttgcacttgatgcacaagttgctcatgtagatgacggtattttagttaattgggacatccgtttagatgctctccccaaagaatggatcacgaatttatttgaatctttcattcatttacttaaaaatcttgccgcacatcctgagcaactgaatacacaaattataagcccagcacaaaatacctcgtcagatcgtacgtctcaaaaaccattaaatgcattacagcaagcctacctattaggccgaactcaagcccttcctttaggtggtgttgccatgcaagagtttaggcagtatcacggcaaaatggatattgttttattaagacaacgattggcagaaatggtacggcggcatgacagcttacgaacctatattgataaaaataggttaatacaatatgtaagcgatcaagtgagtgtcaatttaaaagaaatagacctaactacatgggaacctgaacgtgcttctcaccacatccagtcctataaaaatagttatacgcatgagctatttgatttaaatcagtcgccttggaatatcaccgtctttttattaaaaaataatctactaacgatttttgtccgctttgatgcattaattttagatggccgatctatagcttcacttatgttagagctattcgatggacaacaacatgatatccaaacgcaaatagaagaaaatgaagttgaaaatagcctgtctgttcatcacgcagatatggcttactgggaaagaaaattttctaaattatcggctattcctgcgcttccgtggaaaacacccttacagcatttaccgacttcacgttaccaacgtaacagtctggttatagaaaaagatcaatttaaacagttgtctaaaattggcgcaaaacattcactgtttaaaaactcagtcatcatggcgattattttggaagtgctatctcattggaacactgacaaatctctatgtgttgctgttcctacacttcccctctatgccggaccattttccaatagttctacgtttattgctgttgagtggaaagcttcagatcaatttgctgaacaagcaaaccgtttgcaaactgaagttttagagggtttacagtatctttcattttcaggcgttgatctcgctcgactattatttgaaaaagttggcactgctccagtattaccgattgtaattacaaatggtttgtcatggccggtattatctgaatctcatcctattcagcaactagatggccttactcaaacacctcaagttgcaattgatattcgctttagcacaagaaatgacggcgctttgattttcgatattgattatgcccaagaagcatttccacccaacatgattgacgatttcttggatgcactgcaattagcaatcaagcaaattattggttcagaaatattcagttttgatctcagcaattttttcagtgagcttcaaaataaacgactatattttaaaaataatgagtccgatcattcatctataccaattgaaaataatgctaaacagcaaaatcaactactcgacatttacttagaagtgataggccacccgccaaatatggaagtggacaactcaactcattttactcatctcgggctacgtccacatcatttaaaggtcgtttcaaaacgtattaatgaaacatatgcgattcagctctcacctgttcaacttattcaatgtcgcaatattgctgatgtagagaaactactaacaccacattaa

SEQ ID NO: 5992 - protein, 980 aa, Acinetobacter baumannii
  misc_feature (217)..(217): Xaa can be any naturally occurring amino acid
MQLVIIFICLYDAETRLICQPSYRSMCELTSMQAACWFGRSGNATLGGVAAHLYAEFDGQFIDLQKLHLALQRLYKEHPILRLSLSADGIANIMAEKAQQILEVDDFSKLSDHEIEQMLMQKREQWTHQKLDLSQGQTARFSVSVLKNNIFRFHVDTDMIAIDPSSFLNLMEDLSLFYEDPEISFSRPPNFFDWYQKVRTDPDLKKLSQRDRLWWKXRLPQISPAPSLPFIHQEFKTAKSDRLSTWLSPKERTALQQLAREQRITVTNLILGLFAYTLGHTTKDHSFRLNIPTFWREPVLKNVEGTIGDFANLVILDVDMKGITTLAAFCKQIANQMLELLEHSHYSGVNVLRDLSRYHGSAQIAPVVFTAALDLENDNLLSERVRRVFGSMNWVISQGPQVALDAQVAHVDDGILVNWDIRLDALPKEWITNLFESFIHLLKNLAAHPEQLNTQIISPAQNTSSDRTSQKPLNALQQAYLLGRTQALPLGGVAMQEFRQYHGKMDIVLLRQRLAEMVRRHDSLRTYIDKNRLIQYVSDQVSVNLKEIDLTTWEPERASHHIQSYKNSYTHELFDLNQSPWNITVFLLKNNLLTIFVRFDALILDGRSIASLMLELFDGQQHDIQTQIEENEVENSLSVHHADMAYWERKFSKLSAIPALPWKTPLQHLPTSRYQRNSLVIEKDQFKQLSKIGAKHSLFKNSVIMAIILEVLSHWNTDKSLCVAVPTLPLYAGPFSNSSTFIAVEWKASDQFAEQANRLQTEVLEGLQYLSFSGVDLARLLFEKVGTAPVLPIVITNGLSWPVLSESHPIQQLDGLTQTPQVAIDIRFSTRNDGALIFDIDYAQEAFPPNMIDDFLDALQLAIKQIIGSEIFSFDLSNFFSELQNKRLYFKNNESDHSSIPIENNAKQQNQLLDIYLEVIGHPPNMEVDNSTHFTHLGLRPHHLKVVSKRINETYAIQLSPVQLIQCRNIADVEKLLTPH

SEQ ID NO: 5993 - DNA, 1170 bp, Acinetobacter baumannii
  misc_feature (593)..(593): n is a, c, g or t
atgatgcagactcaaatatcagtagagcaaaatttagatcatatcggtcaaaagaaattttcatgtttttctacgaagaattattatctcgaggtcaatgaattcgttaaaacgttaaatacacctgctgcaaataccgcactattgaatgaagagattgcaaaatgctttgaagaaattaaaaagcaaggccatcaaaatccagttttaattggtgctataccttttgatattacaaagaaaagtagcttaaatttttatgctgatcataaaaaaataacacaagcatcttctacgattaattcattaaaaaatcgtaataacattgagataattaataaatcattactcattcaacgacaaaaatttgaaggtacagtacagctagctttagatgcttttgagaaaaagaaggtagaaaaagttgttctctctcaggctgttgaatatgagtttaaccgtcatcaagagcctgaaaatttattggctgctttattaaaacaaaatccaaatgcttataattttgtgattccagtcgagcataataattatattctaggtgcaagtcctgaactgcttttatcaaaacaagnccgtattgtaaccagtaatcctttggccggttctcgtcctaaatctcaaatttctgaaaaaaatttcgtcagccaacaagaattaaatcattctgagaaagatcaacatgaacatcgaattgtggttgaaaatattattaaaaatttagctactcattgtgtagagcttaaggtttctgaatttccagatattttagaaacatcaacgatgttgcatttatcatcagaattccaaggtgtgcttaagcaacaggctcccgatgccttaaaccttgcattagaattacatccaacaccagcagtttgtggctcaccaactcatgttgctaagcagtttattttagatcatgaaggttatgaccgacattattacacggggttagtcggctggatggatgcggagggtaatggtgagtgggtagtgacgattcgatgtggtctacttagtgaaaataaaatgcgcttatatgctggtgcggggattgttgaagggtcagatgctgaagctgaatggttagaaacagaagctaaaatgcaaaccatgttaaatattctaaatacaaaaattgctgtgtaa

SEQ ID NO: 5994 - protein, 389 aa, Acinetobacter baumannii
  misc_feature (198)..(198): Xaa can be any naturally occurring amino acid
MMQTQISVEQNLDHIGQKKFSCFSTKNYYLEVNEFVKTLNTPAANTALLNEEIAKCFEEIKKQGHQNPVLIGAIPFDITKKSSLNFYADHKKITQASSTINSLKNRNNIEIINKSLLIQRQKFEGTVQLALDAFEKKKVEKVVLSQAVEYEFNRHQEPENLLAALLKQNPNAYNFVIPVEHNNYILGASPELLLSKQXRIVTSNPLAGSRPKSQISEKNFVSQQELNHSEKDQHEHRIVVENIIKNLATHCVELKVSEFPDILETSTMLHLSSEFQGVLKQQAPDALNLALELHPTPAVCGSPTHVAKQFILDHEGYDRHYYTGLVGWMDAEGNGEWVVTIRCGLLSENKMRLYAGAGIVEGSDAEAEWLETEAKMQTMLNILNTKIAV

SEQ ID NO: 5995 - DNA, 1152 bp, Acinetobacter baumannii
  misc_feature (1024)..(1024): n is a, c, g or t
atgcgatttaaaaaaatttcttgtctacttttatccccgctttttatttttagtacctcaatttatgcgggcaatacaccaaaagaccaagaaattaaaaaactggtagatcaaaactttaaaccgttattagaaaaatatgatgtgccaggtatggctgtgggtgttattcaaaataataaaaagtatgaaatgtattatggtcttcaatctgttcaagataaaaaagccgtaaatagcagtactatttttgagctaggttctgtcagtaaattatttaccgcgacagcaggtggatatgcaaaaaataaaggaaaaatctcttttgacgatacgcctggtaaatattggaaagtgctaaaaaatacaccgattgaccaagttaacttacttcaactcgcgacgtatacaagtggtaaccttgccttgcagtttccagatgaagtacaaacagaccaacaagttttaacttttttcaaagactggaaacctaaaaacccaatcggtgaatacagacaatattcaaatccaagtattggcctatttggaaaggttgtagctttgtctatgaataaacctttcgaccaagtcttagaaaaaacaatttttccggcccttggcttaaaacatagctatgtaaatgtacctaagacccaaatgcaaaactatgcttttggctataaccaagaaaatcagccgattcgagttaaccccggtccactcgatgccccagcatatggcgtcaaatcaacactacccgacatgttgagttttattcatgccaaccttaacccacagaaatatccggctgatattcaaagggcaattaatgaaacacatcaagggttctatcaagtaaataccatgtatcaagcgcttggttgggaagagttttcttatccggcaacgttacaaactttattagacagtaattcagaacagattgtgatgaaacctaataaagtgactgctatttcaaaagaaccttcagttaagatgtaccataaaactggctcaactaacngtttcggaacgtatgtggtctttattcctaaagaaaatattggcttagtcatgttaaccaataaacgtattccaaatgaagagcgcattaaggcagcttatgctgtgctgaatgcaataaagaaataa

SEQ ID NO: 5996 - protein, 383 aa, Acinetobacter baumannii
  misc_feature (342)..(342): Xaa can be any naturally occurring amino acid
MRFKKISCLLLSPLFIFSTSIYAGNTPKDQEIKKLVDQNFKPLLEKYDVPGMAVGVIQNNKKYEMYYGLQSVQDKKAVNSSTIFELGSVSKLFTATAGGYAKNKGKISFDDTPGKYWKVLKNTPIDQVNLLQLATYTSGNLALQFPDEVQTDQQVLTFFKDWKPKNPIGEYRQYSNPSIGLFGKVVALSMNKPFDQVLEKTIFPALGLKHSYVNVPKTQMQNYAFGYNQENQPIRVNPGPLDAPAYGVKSTLPDMLSFIHANLNPQKYPADIQRAINETHQGFYQVNTMYQALGWEEFSYPATLQTLLDSNSEQIVMKPNKVTAISKEPSVKMYHKTGSTNXFGTYVVFIPKENIGLVMLTNKRIPNEERIKAAYAVLNAIKK

SEQ ID NO: 5997 - DNA, 1491 bp, Acinetobacter baumannii
  misc_feature (976)..(976): n is a, c, g or t
atgagttattttgatcccaccctcatcatgtttatggtgtacatcgtagcaatggtacttatcggcttatttgcctaccgtgctacaagcgacttctctgattatattcttggtggtcgtagtttaggcagtttcgttactgcattatccgcaggcgcatcggacatgagtggttggttactcatgggcttaccaggagcgatttatctttctggtttatctgaagcgtggattgcaattggtctaattatcggtgcttggcttaactggttactggttgctggtcgattacgcgttcatactgaaatccaaaataatgcactcactctgccagactattttacaagtcgatttgatgaccagaaaaagatacttcgtattttctctgccgttattatcttggttttcttcgctatttactgtgcttcaggcatggtagctggtgcccgtttatttgaaaatttattcggtatgtcatataccaccgcaatctggttaagtgctattgcaacaatcagttatgtttgtattggtggtttcttagcaattagctggactgatactttccaagcgggcttaatgatttttgccctcttgctcactccaatagtgacttacctcgcaattggtgatacaactcagtttgtgacgcttattgaaactgctcgtccacatgcatttaacatcatttctgatttaagtgtggtggccgttttatcttccatggcttgggggttaggctattttggtcaaccgcatatccttgtacgtttcatggctgccgactctgtaaaatcaattcctgctgctcgccgtatcggtatgacctggatgattttatgtttagtcggtgctgtcggtgccggtttctttggtattgcttacttccagcaacaccctgaacttgcaggtgtggtaagcaaaaaccctgaaactgtatttatggaattgactaaaattttattcaatccatggnttgtcggtatcattctagctgctattttagctgcggttatgagtacattaagctgtcagcttttggtatgttcaagtgcactaactgaagatttgtacaaaggcttcattcgtaaaaatgcatctcaaaaagagcttgtatgggttgggcgtatcatggttcttgcaattgccgttctagcaattgtgcttgcggggaatcctgacagtaaagttcttggtcttgttgcttacgcttgggctggttttggtgctgcatttggaccactcatcatcttgtcattgttctggaaacgtatgactttagaaggtgctttagcaggtatgatcgtaggtgctgttgttgtaatcggttggaaaaaccttttcgcaagcactggggtttacgaaattattccaggctttatctgtgcatttatcagcatcatcgtagtaagcttgatcagcaaagcgccaaactctgatgtgactggtcgctttgagcaagcagataaactctataaagaaagtacataa

SEQ ID NO: 5998 - protein, 496 aa, Acinetobacter baumannii
  misc_feature (326)..(326): Xaa can be any naturally occurring amino acid
MSYFDPTLIMFMVYIVAMVLIGLFAYRATSDFSDYILGGRSLGSFVTALSAGASDMSGWLLMGLPGAIYLSGLSEAWIAIGLIIGAWLNWLLVAGRLRVHTEIQNNALTLPDYFTSRFDDQKKILRIFSAVIILVFFAIYCASGMVAGARLFENLFGMSYTTAIWLSAIATISYVCIGGFLAISWTDTFQAGLMIFALLLTPIVTYLAIGDTTQFVTLIETARPHAFNIISDLSVVAVLSSMAWGLGYFGQPHILVRFMAADSVKSIPAARRIGMTWMILCLVGAVGAGFFGIAYFQQHPELAGVVSKNPETVFMELTKILFNPWXVGIILAAILAAVMSTLSCQLLVCSSALTEDLYKGFIRKNASQKELVWVGRIMVLAIAVLAIVLAGNPDSKVLGLVAYAWAGFGAAFGPLIILSLFWKRMTLEGALAGMIVGAVVVIGWKNLFASTGVYEIIPGFICAFISIIVVSLISKAPNSDVTGRFEQADKLYKEST

SEQ ID NO: 5999 - DNA, 1785 bp, Acinetobacter baumannii
  misc_feature (529)..(529): n is a, c, g or t
atgaacttgaaattaaaattttttaagctcgccattttaagtctggctattacatcagttccttgtgcttacgcaattacgccagcgcaaccaaacaaaattttgcatgttgcctatgaggccccagatgatggtttcgatatggtcaaaaccaccaatttctatagtgctagtattgctgaggcaatttttgagcctttactcaaatatgactatttagcacgtccattacagttagttcccaatactgtagaaagcctgcccaaagtggaacaagacggtaaagtttatatatttaaaattaagccaggtatctattttaccaatgatcccgcttttaaaggtaaacgccgtgagctagtagccgaagattacatctatacaattaaacgtattttagaccctaaaaatagagcgccttctgtttcttttattgatggtaagttacaaggtgccgatgtggttgtagctcaagcaaagaaaactggaaaatttgattatgctgctccaattgcagggcttaaagcgnttgatcgatatactctacaatttactctgactcgccaagactataattttccttatattcttgcctatattgcatttggtggtgttgctaaagaggttgttgattattacggtgatcgtattggcatgcatccagtaggtactggaccgtacatgttaagtaaatatgttccaagaagtaaggtcgagttggttgccaatcctgattatcgtggttttgtctggaattttaagtcaacaggaacgccttgggacaaccaacttgttaaggaaatgtctggaaagaaaatgccacaaattggcaaagttgtagtgagcattattgaagaacaacaatcaagatggttagcttttcaatcgggtcaattagattttgacaaacttacagcagatgccgttcctcaagccttagatggaaatcaacttaaagcttcttttcaaaaaagaggcattaaacactttccatataaagaacctgaaatgacctataccatgatgaatatgcgtgatccggtgattggtggttttagcccggaaaaaatagcgcttcgtagagcaattactttggcctatgaccaaaaagaaagtataaaacaggcatataaaggtcaggcagttagagcagaaatgtttatacctgaaggtgtaaatggatataacccgaagtataaaagtagcgtaggatataatccacggctagcaaataaactgcttgattattatggctataaaaaagcggctgatggctaccggaccttaccaaatggcaaacctttaattttaaaaatcaatacagaaaatagctcagcatcggttattcattcagaactctggaaaaaaaatctagatgcgattggcattcgagctgactttaaggtaagtaactttgcagataacttaaaagccgctactcaatgtaaatatatgatctggagcggtgcatggattgctgactatccggaaggagataattttgcacaattactatatggaccaaatgctgggcagggaaaccatgcttgttatcagtctaaaacctatgatgctctttatactcaggccattcatttaccacctcaacaacgtctaccatattacgaaaaacttaaccgtcagattgaagctgataatccttggattattcatgtaactcgaattcgcaattggttgatacgcccacaagttcagggttttaaacctcacccaatgatgaatacaaactggcaatatcttgatattacccctattaaaaaataa

SEQ ID NO: 6000 - protein, 594 aa, Acinetobacter baumannii
  misc_feature (177)..(177): Xaa can be any naturally occurring amino acid
MNLKLKFFKLAILSLAITSVPCAYAITPAQPNKILHVAYEAPDDGFDMVKTTNFYSASIAEAIFEPLLKYDYLARPLQLVPNTVESLPKVEQDGKVYIFKIKPGIYFTNDPAFKGKRRELVAEDYIYTIKRILDPKNRAPSVSFIDGKLQGADVVVAQAKKTGKFDYAAPIAGLKAXDRYTLQFTLTRQDYNFPYILAYIAFGGVAKEVVDYYGDRIGMHPVGTGPYMLSKYVPRSKVELVANPDYRGFVWNFKSTGTPWDNQLVKEMSGKKMPQIGKVVVSIIEEQQSRWLAFQSGQLDFDKLTADAVPQALDGNQLKASFQKRGIKHFPYKEPEMTYTMMNMRDPVIGGFSPEKIALRRAITLAYDQKESIKQAYKGQAVRAEMFIPEGVNGYNPKYKSSVGYNPRLANKLLDYYGYKKAADGYRTLPNGKPLILKINTENSSASVIHSELWKKNLDAIGIRADFKVSNFADNLKAATQCKYMIWSGAWIADYPEGDNFAQLLYGPNAGQGNHACYQSKTYDALYTQAIHLPPQQRLPYYEKLNRQIEADNPWIIHVTRIRNWLIRPQVQGFKPHPMMNTNWQYLDITPIKK

SEQ ID NO: 6001 - DNA, 1785 bp, Acinetobacter baumannii
  misc_feature (520)..(520): n is a, c, g or t
atgaacttgaaattaaaattttttaagctcgccattttaagtctggctattacatcagttccttgtgcttacgcaattacgccagcgcaaccaaacaaaattttgcatgttgcctatgaggccccagatgatggtttcgatatggtcaaaaccaccaatttctatagtgctagtattgctgaggcaatttttgagcctttactcaaatatgactatttagcacgtccattacagttagttcccaatactgtagaaagcctgcccaaagtggaacaagacggtaaagtttatatatttaaaattaagccaggtatctattttaccaatgatcccgcttttaaaggtaaacgccgtgagctagtagccgaagattacatctatacaattaaacgtattttagaccctaaaaatagagcgccttctgtttcttttattgatggtaagttacaaggtgccgatgtggttgtagctcaagcaaagaaaactggaaaatttgattatgctgctccaattgcagggnttaaagcgattgatcgatatactctacaatttactctgactcgccaagactataattttccttatattcttgcctatattgcatttggtggtgttgctaaagaggttgttgattattacggtgatcgtattggcatgcatccagtaggtactggaccgtacatgttaagtaaatatgttccaagaagtaaggtcgagttggttgccaatcctgattatcgtggttttgtctggaattttaagtcaacaggaacgccttgggacaaccaacttgttaaggaaatgtctggaaagaaaatgccacaaattggcaaagttgtagtgagcattattgaagaacaacaatcaagatggttagcttttcaatcgggtcaattagattttgacaaacttacagcagatgccgttcctcaagccttagatggaaatcaacttaaagcttcttttcaaaaaagaggcattaaacactttccatataaagaacctgaaatgacctataccatgatgaatatgcgtgatccggtgattggtggttttagcccggaaaaaatagcgcttcgtagagcaattactttggcctatgaccaaaaagaaagtataaaacaggcatataaaggtcaggcagttagagcagaaatgtttatacctgaaggtgtaaatggatataacccgaagtataaaagtagcgtaggatataatccacggctagcaaataaactgcttgattattatggctataaaaaagcggctgatggctaccggaccttaccaaatggcaaacctttaattttaaaaatcaatacagaaaatagctcagcatcggttattcattcagaactctggaaaaaaaatctagatgcgattggcattcgagctgactttaaggtaagtaactttgcagataacttaaaagccgctactcaatgtaaatatatgatctggagcggtgcatggattgctgactatccggaaggagataattttgcacaattactatatggaccaaatgctgggcagggaaaccatgcttgttatcagtctaaaacctatgatgctctttatactcaggccattcatttaccacctcaacaacgtctaccatattacgaaaaacttaaccgtcagattgaagctgataatccttggattattcatgtaactcgaattcgcaattggttgatacgcccacaagttcagggttttaaacctcacccaatgatgaatacaaactggcaatatcttgatattacccctattaaaaaataa

SEQ ID NO: 6002 - protein, 594 aa, Acinetobacter baumannii
  misc_feature (174)..(174): Xaa can be any naturally occurring amino acid
MNLKLKFFKLAILSLAITSVPCAYAITPAQPNKILHVAYEAPDDGFDMVKTTNFYSASIAEAIFEPLLKYDYLARPLQLVPNTVESLPKVEQDGKVYIFKIKPGIYFTNDPAFKGKRRELVAEDYIYTIKRILDPKNRAPSVSFIDGKLQGADVVVAQAKKTGKFDYAAPIAGXKAIDRYTLQFTLTRQDYNFPYILAYIAFGGVAKEVVDYYGDRIGMHPVGTGPYMLSKYVPRSKVELVANPDYRGFVWNFKSTGTPWDNQLVKEMSGKKMPQIGKVVVSIIEEQQSRWLAFQSGQLDFDKLTADAVPQALDGNQLKASFQKRGIKHFPYKEPEMTYTMMNMRDPVIGGFSPEKIALRRAITLAYDQKESIKQAYKGQAVRAEMFIPEGVNGYNPKYKSSVGYNPRLANKLLDYYGYKKAADGYRTLPNGKPLILKINTENSSASVIHSELWKKNLDAIGIRADFKVSNFADNLKAATQCKYMIWSGAWIADYPEGDNFAQLLYGPNAGQGNHACYQSKTYDALYTQAIHLPPQQRLPYYEKLNRQIEADNPWIIHVTRIRNWLIRPQVQGFKPHPMMNTNWQYLDITPIKK

SEQ ID NO: 6003 - DNA, 1206 bp, Acinetobacter baumannii
  misc_feature (715)..(715): n is a, c, g or t
atgaatttacaaaatccaaaaaaattcaaaatgatgattgatcaggcacatgatgttgcgatcaatgtattacgccctatttcccgtaaatacgataaagcagaacatgcttatccgaaagagttggatatgcttgcttcactcattgatggcatgaatgaaggtggtgaaggaattaatgcaggtgctgccggtgcaggaaaacgtggtgaaactgataatgaaggagtccgtaatggaaccaacatgtcaacagcgttaggcatcattgaaatgtgttatggcgatacgggtttattgctcagcatgccacgtcaaggtttaggaaattctgcaattgccgcggtcgcaaatgatgagcagctagaacgttttaagggtacttgggcagctatggccattaccgagccaggttgcggttctgattctgctgcgatccgtactacggcaactaaagatggcaatgactatattttaaatggtgaaaagattttcgtaacttctggtgaacgtgcggactcggtagttgtatgggctacacttgaccgaaaacttggacgcgcagcaatcaaatcatttgtggtgcctaagggtacacccggaatgaaggttgagcgacttgaacataagttaggtatcaaagcttctgatacagccgttattagttttactgactgtcgtgttccagctgaaaacttgctcggtaaccctgaanttgatgttgcaaaaggttttgccggtgtaatggaaacctttgataatacacgtccattggtcgcagcaatggcaattggctgtgccaaggcttctttagagcgtattaaagaaatttttaaagaccagttagaccccaattactcgactccatatttgcaaacatccaaccttgctgcacaaatttaccgaatggaagccgaatgggaagctgcacggttacttatgctgaaagccacttggatggcggacaataagaaaccaaactcaaaagaagcttccatcgctaaagcaaaagcaggtcgtgtaggcaatgaaatcactttgaagtgtgtcgagttagcagcaagtgttggctataacgaagatgaactacttgagaagtgggcacgtgattcaaaaattcttgatatttttgaaggtactcaacaaatccagcaacttattattgcgcgacgtgagcttggaaaatcttcaagtgaactaaaatag

SEQ ID NO: 6004 - protein, 401 aa, Acinetobacter baumannii
  misc_feature (239)..(239): Xaa can be any naturally occurring amino acid
MNLQNPKKFKMMIDQAHDVAINVLRPISRKYDKAEHAYPKELDMLASLIDGMNEGGEGINAGAAGAGKRGETDNEGVRNGTNMSTALGIIEMCYGDTGLLLSMPRQGLGNSAIAAVANDEQLERFKGTWAAMAITEPGCGSDSAAIRTTATKDGNDYILNGEKIFVTSGERADSVVVWATLDRKLGRAAIKSFVVPKGTPGMKVERLEHKLGIKASDTAVISFTDCRVPAENLLGNPEXDVAKGFAGVMETFDNTRPLVAAMAIGCAKASLERIKEIFKDQLDPNYSTPYLQTSNLAAQIYRMEAEWEAARLLMLKATWMADNKKPNSKEASIAKAKAGRVGNEITLKCVELAASVGYNEDELLEKWARDSKILDIFEGTQQIQQLIIARRELGKSSSELK

SEQ ID NO: 6005 - DNA, 1206 bp, Acinetobacter baumannii
  misc_feature (853)..(853): n is a, c, g or t
atgaatttacaaaatccaaaaaaattcaaaatgatgattgatcaggcacatgatgttgcgatcaatgtattacgccctatttcccgtaaatacgataaagcagaacatgcttatccgaaagagttggatatgcttgcttcactcattgatggcatgaatgaaggtggtgaaggaattaatgcaggtgctgccggtgcaggaaaacgtggtgaaactgataatgaaggagtccgtaatggaaccaacatgtcaacagcgttaggcatcattgaaatgtgttatggcgatacgggtttattgctcagcatgccacgtcaaggtttaggaaattctgcaattgccgcggtcgcaaatgatgagcagctagaacgttttaagggtacttgggcagctatggccattaccgagccaggttgcggttctgattctgctgcgatccgtactacggcaactaaagatggcaatgactatattttaaatggtgaaaagattttcgtaacttctggtgaacgtgcggactcggtagttgtatgggctacacttgaccgaaaacttggacgcgcagcaatcaaatcatttgtggtgcctaagggtacacccggaatgaaggttgagcgacttgaacataagttaggtatcaaagcttctgatacagccgttattagttttactgactgtcgtgttccagctgaaaacttgctcggtaaccctgaaattgatgttgcaaaaggttttgccggtgtaatggaaacctttgataatacacgtccattggtcgcagcaatggcaattggctgtgccaaggcttctttagagcgtattaaagaaatttttaaagaccagttagaccccnattactcgactccatatttgcaaacatccaaccttgctgcacaaatttaccgaatggaagccgaatgggaagctgcacggttacttatgctgaaagccacttggatggcggacaataagaaaccaaactcaaaagaagcttccatcgctaaagcaaaagcaggtcgtgtaggcaatgaaatcactttgaagtgtgtcgagttagcagcaagtgttggctataacgaagatgaactacttgagaagtgggcacgtgattcaaaaattcttgatatttttgaaggtactcaacaaatccagcaacttattattgcgcgacgtgagcttggaaaatcttcaagtgaactaaaatag

SEQ ID NO: 6006 - protein, 401 aa, Acinetobacter baumannii
  misc_feature (285)..(285): Xaa can be any naturally occurring amino acid
MNLQNPKKFKMMIDQAHDVAINVLRPISRKYDKAEHAYPKELDMLASLIDGMNEGGEGINAGAAGAGKRGETDNEGVRNGTNMSTALGIIEMCYGDTGLLLSMPRQGLGNSAIAAVANDEQLERFKGTWAAMAITEPGCGSDSAAIRTTATKDGNDYILNGEKIFVTSGERADSVVVWATLDRKLGRAAIKSFVVPKGTPGMKVERLEHKLGIKASDTAVISFTDCRVPAENLLGNPEIDVAKGFAGVMETFDNTRPLVAAMAIGCAKASLERIKEIFKDQLDPXYSTPYLQTSNLAAQIYRMEAEWEAARLLMLKATWMADNKKPNSKEASIAKAKAGRVGNEITLKCVELAASVGYNEDELLEKWARDSKILDIFEGTQQIQQLIIARRELGKSSSELK

SEQ ID NO: 6007 - DNA, 1206 bp, Acinetobacter sp. ADP1
  misc_feature (709)..(709): n is a, c, g or t
atgaatttacaaaatccaaaaaaattcaaaatgatgattgatcaggcacatgatgttgcgatcaatgtattacgccctatttcccgtaaatacgataaagcagaacatgcttatccgaaagagttggatatgcttgcttcactcattgatggcatgaatgaaggtggtgaaggaattaatgcaggtgctgccggtgcaggaaaacgtggtgaaactgataatgaaggagtccgtaatggaaccaacatgtcaacagcgttaggcatcattgaaatgtgttatggcgatacgggtttattgctcagcatgccacgtcaaggtttaggaaattctgcaattgccgcggtcgcaaatgatgagcagctagaacgttttaagggtacttgggcagctatggccattaccgagccaggttgcggttctgattctgctgcgatccgtactacggcaactaaagatggcaatgactatattttaaatggtgaaaagattttcgtaacttctggtgaacgtgcggactcggtagttgtatgggctacacttgaccgaaaacttggacgcgcagcaatcaaatcatttgtggtgcctaagggtacacccggaatgaaggttgagcgacttgaacataagttaggtatcaaagcttctgatacagccgttattagttttactgactgtcgtgttccagctgaaaacttgctcggtaacnctgaaattgatgttgcaaaaggttttgccggtgtaatggaaacctttgataatacacgtccattggtcgcagcaatggcaattggctgtgccaaggcttctttagagcgtattaaagaaatttttaaagaccagttagaccccaattactcgactccatatttgcaaacatccaaccttgctgcacaaatttaccgaatggaagccgaatgggaagctgcacggttacttatgctgaaagccacttggatggcggacaataagaaaccaaactcaaaagaagcttccatcgctaaagcaaaagcaggtcgtgtaggcaatgaaatcactttgaagtgtgtcgagttagcagcaagtgttggctataacgaagatgaactacttgagaagtgggcacgtgattcaaaaattcttgatatttttgaaggtactcaacaaatccagcaacttattattgcgcgacgtgagcttggaaaatcttcaagtgaactaaaatag

SEQ ID NO: 6008 - protein, 401 aa, Acinetobacter sp. ADP1
  misc_feature (237)..(237): Xaa can be any naturally occurring amino acid
MNLQNPKKFKMMIDQAHDVAINVLRPISRKYDKAEHAYPKELDMLASLIDGMNEGGEGINAGAAGAGKRGETDNEGVRNGTNMSTALGIIEMCYGDTGLLLSMPRQGLGNSAIAAVANDEQLERFKGTWAAMAITEPGCGSDSAAIRTTATKDGNDYILNGEKIFVTSGERADSVVVWATLDRKLGRAAIKSFVVPKGTPGMKVERLEHKLGIKASDTAVISFTDCRVPAENLLGNXEIDVAKGFAGVMETFDNTRPLVAAMAIGCAKASLERIKEIFKDQLDPNYSTPYLQTSNLAAQIYRMEAEWEAARLLMLKATWMADNKKPNSKEASIAKAKAGRVGNEITLKCVELAASVGYNEDELLEKWARDSKILDIFEGTQQIQQLIIARRELGKSSSELK

SEQ ID NO: 6009 - DNA, 1842 bp, Acinetobacter baumannii
  misc_feature (737)..(737): n is a, c, g or t
atgggacaattacatccagttttatcaaatacacatgtgattcaaaatactttacaggcttggcagcatccaaattcggatcaggcaaaatatgttgagcaacgtgttattaaacaattacttcaagctttaatttttgaagatattattcattcagaatatgatggaaaaaattttattatagaagtacaaaatagtcagggccaaaccattcgttatgtcgctgcagggcaaagacaatatagttacaaactagtacgtctcgcccgcaatcaggatgtatttcgtcaagatgaaaacggtcattatcagattgctactttaaatttagttattgatgaaattcttagaaccataaccgatgcagcaaaagttgaagattttatttttgaattaaaacgaacatttattcatgatttacagtctcaagcatgttttgatcactatgctttgccggcaattcaatatccatatgatattttagaatcatatttaatggatggtcatccatatcatccgtgttacaagtcacgtgtaggttttagtttacaagacaatgtacgctatggtgtggagttcgcccaaccaatcgccttggtgtggttggctgtgcatcaggacattgttgcaaaaaaacattcagaagatatagaaccagattcattttttaaggagcaattgaattcacaagatcaagagctattcctgcaacatctctcagatcgtgatttgaaggntgatgaatatatttggattccggttcatccttggcaatgggaaaaccatttaatttctatttttgctgaagaaattctaaatggtaaaattgtttatttagggcaaagtcaggatcgctatttagcccaacaatctctacgcactatgactaacttgcagcatccggaaaagccttatatcaaactgtcgatgagtctaactaatacatcaagctcacgtgttctggctaaacatacagtaatgaatgggccaattattacagactggttgcaacgcttaattaaacagagcaaaaccgcccaagagcttgattttgctgtattacgtgaagtgtatggtttaagcgtggattttactaaattgccaaaatcacatgctcaacaggcctatggcacaattggatgtctatggcgtgagagtgtgcatcaatatttacgtgaaggtgaagatgcaataccgttaaatggcgtgagtcatatccaaaaagatgggcaagcattaattgcaccatggttacagcaatatggtgttgaatcatggacacgtcaacttttgaaagttgtaattactcctttgattcatttactttttgcggagggaattgcaactgaatcacatggccaaaatattattcttgtacataaacaaggttggccaacgcgagttcttttaaaagacttccatgatggtgtgcgctatagcccagcacatttagcacaccctgaattggctcctgaactcgatcagttgccgcctgagcatgcaaaaaccaacagtatgtcatttattttgacagatgatttaaatggtattcgtgattttagctgtgcctgtctgttttttgtcgctttaaccgatattgcaatatttttaaatcaagactttgatcttccagaaaaaaatttctggcaatgggcagcggaagtcatccaaaattaccagcagcaacatccagagcatgcttcacgttaccaattatttgatgtttttgccgaaaaattgcgcattgagtcattaactaaacggcgtttatttggtgatcgtagtatacaaattaaatttgtagataacccgttagctccttttaaattgcaggtgaagtga

SEQ ID NO: 6010 - protein, 613 aa, Acinetobacter baumannii
  misc_feature (246)..(246): Xaa can be any naturally occurring amino acid
MGQLHPVLSNTHVIQNTLQAWQHPNSDQAKYVEQRVIKQLLQALIFEDIIHSEYDGKNFIIEVQNSQGQTIRYVAAGQRQYSYKLVRLARNQDVFRQDENGHYQIATLNLVIDEILRTITDAAKVEDFIFELKRTFIHDLQSQACFDHYALPAIQYPYDILESYLMDGHPYHPCYKSRVGFSLQDNVRYGVEFAQPIALVWLAVHQDIVAKKHSEDIEPDSFFKEQLNSQDQELFLQHLSDRDLKXDEYIWIPVHPWQWENHLISIFAEEILNGKIVYLGQSQDRYLAQQSLRTMTNLQHPEKPYIKLSMSLTNTSSSRVLAKHTVMNGPIITDWLQRLIKQSKTAQELDFAVLREVYGLSVDFTKLPKSHAQQAYGTIGCLWRESVHQYLREGEDAIPLNGVSHIQKDGQALIAPWLQQYGVESWTRQLLKVVITPLIHLLFAEGIATESHGQNIILVHKQGWPTRVLLKDFHDGVRYSPAHLAHPELAPELDQLPPEHAKTNSMSFILTDDLNGIRDFSCACLFFVALTDIAIFLNQDFDLPEKNFWQWAAEVIQNYQQQHPEHASRYQLFDVFAEKLRIESLTKRRLFGDRSIQIKFVDNPLAPFKLQVK

SEQ ID NO: 6011 - DNA, 810 bp, Acinetobacter baumannii
  misc_feature (711)..(711): n is a, c, g or t
atgactcaatctcagcctccgcacattaatcgtaaactcaatgtacaagcttggtggctgaccgccctactgatctcgattaatgtaggtttattcatctggcaaattatatctggagtcgacattagtgacccagccataaaagatgcccttcactggggtgcagattttacaccacttactttttctgggcagccagaacgtctatttaccagcatgttttttcattttggtattgttcatcttatgctcaacatgggagccttatatattttcggcaatgttgctgaagttttgcttagcaggtcatatttcattattctgtatctgcttgcaggcgtatttggcagccttttgagtagttatatcaatattcaaaatgggtatgaattattacaacattttgatcagagcctgcttccccatgtaagtgccggagcatcaggcgccattatgggattaggtactgcattaactgttctttctttatttccacctctgccacatcaagtacgtatactcaataaaaaagtatatctggtaacaatggcgattaaccttattttcggttttgtcgcaacaggtattaataatgctgcacatgtcggcggtatgattatgggtgccttactcgcactcatttggtatttaagctaccgcactcaatttaaaagcctcctaaaatttttaggtctattgggaggacttttnataactgtcggcttctatgtttactgtaatcagcttaactcaccattacttccgctttggcatgaggttttaattcagaacccagaaatactcccctaa

SEQ ID NO: 6012 - protein, 269 aa, Acinetobacter baumannii
  misc_feature (237)..(237): Xaa can be any naturally occurring amino acid
MTQSQPPHINRKLNVQAWWLTALLISINVGLFIWQIISGVDISDPAIKDALHWGADFTPLTFSGQPERLFTSMFFHFGIVHLMLNMGALYIFGNVAEVLLSRSYFIILYLLAGVFGSLLSSYINIQNGYELLQHFDQSLLPHVSAGASGAIMGLGTALTVLSLFPPLPHQVRILNKKVYLVTMAINLIFGFVATGINNAAHVGGMIMGALLALIWYLSYRTQFKSLLKFLGLLGGLXITVGFYVYCNQLNSPLLPLWHEVLIQNPEILP

SEQ ID NO: 6013 - DNA, 2265 bp, Acinetobacter baumannii
  misc_feature (1424)..(1424): n is a, c, g or t
atgtcgaagcgtattatccagtcagtgctttctgtttcagtactggcaagtatgatgtctatggcttttgctgcacaaaatgagcaagaacaagctgaacaaacattagaaaagcctgctgaacctgtgaaattggaaacaattttcgtaacagctgaagagcaagtgaagcaatcgctcggtgtatcggttattaccaaagaagatttagaaaaactaccagttcgtaatgatatttctgactatgtacgtcgtatgccaggtgtcaacctgacaggtaatagtgctactgggcagcgtggtaataatagacaaattgatattcgcggaatgggccctgaaaacacgcttattttagtggacggtaaaccaattaactctcgtaattcagtccgttatggctggaaaggagagcgggatacacgaggcgactcaaactgggtaccagcagaagccatcgagtcgatcgaagttttacgcggaccagcagctgctcgatatggttctggtgcggcaggtggtgtagttaacatcattactaaaaaagtgactaatgaaactcacggttccgtagagttttatacttcacagcctgaagactccaaagaaggttcatcaaatcgtgttggttttaacgtaagtggaccactaattaaggacgttttatcttatcgtttatatggtaattataacaaaacagaagctgacgatgttgatattaataaatcaattggtagtaccgcagcaggccgtgaaggtgttaaaaataaagatatttcaggccgtttagcttggcaggcaacagaccagcaaactgtcttgctcgatatttcttctagcaaacaaggtaatatttattctggtgactctcagttaaatgcaaatgctgaagcggatgcgattctttcgcagctcattggtaaagaaaccaataccatgtatcgtgatagctatgcattaacgcacgaaggtgattggtcttggggtaagagtaagttagttgctcaatatgataagacccataacaaacgtctacctgaaggcttggcgggaagtgtagaaggaaaaattaataatcttgatgataaagccacttcgcgtttagaaactcttcgctttaacggcgaggctaatattccttttgaatactatttaccccaagtattaactgtaggtaccgaatgggttgaagacagatttaaagataatgtctcgacaactcaaggtaaagacagcagtggttcaggttatggcgatcaattagcgaaaggtgatcgtagtaaaatggagtcacgtattgcttctgcatatattgaagataacctgaaagttacagacagcacagatgttgtattaggtttacgttttgatgaccatagtaaatctggttctaattggagcccaagcttaaatattactcaaanacttaacgattatttcactttaaaaggtggggtagcaaaagcttataaagcaccaaatatgtaccaaaatgccgaagggtatttattaagtacaaatggcaatggctgtcctgctaatattgagtcgcgttgtttattacaaggtaatggtgatttaaaacctgaaacatcggtaaacaaagagctcggtattcagttccaaaaagatatcgtgaatgcgagcttaacttggttccgtaatgattataaagataagattgttgcgggtactcatgttgtcggaacagttgatggctcaagtacaaatgcaaatacaggagctgtgacgaatacgaagtggaatattctgcgttgggaaaatacgcctaaagctctaattcaaggttttgagggaagtttaggattagacttcggtgatatccgctggactaacaactttacttatatgatggactcgaaagataaacaaacagggaacccattatctttagtaccaaactatacgattaactcaatttttgattatgacattactgatcaattggatgtaaattttgtatttactcaatatggtcgtcaaaaatcacgtcaatttgcagagaatagacttgaatccggtataggttcaggaggtgcgaattctgcgcttaagccaagtacggtaaaaagctatagtaccgctggtattaatgttggttataagttttcagaccaaattagtacgcgtgttggtgtgagtaatctgtttgataaacaaattttaagagacagtaattctattagccaaacttataatgaaccaggtcgagcttattacgcttctttaaaatattctttttaa

SEQ ID NO: 6014 - protein, 754 aa, Acinetobacter baumannii
  misc_feature (475)..(475): Xaa can be any naturally occurring amino acid
MSKRIIQSVLSVSVLASMMSMAFAAQNEQEQAEQTLEKPAEPVKLETIFVTAEEQVKQSLGVSVITKEDLEKLPVRNDISDYVRRMPGVNLTGNSATGQRGNNRQIDIRGMGPENTLILVDGKPINSRNSVRYGWKGERDTRGDSNWVPAEAIESIEVLRGPAAARYGSGAAGGVVNIITKKVTNETHGSVEFYTSQPEDSKEGSSNRVGFNVSGPLIKDVLSYRLYGNYNKTEADDVDINKSIGSTAAGREGVKNKDISGRLAWQATDQQTVLLDISSSKQGNIYSGDSQLNANAEADAILSQLIGKETNTMYRDSYALTHEGDWSWGKSKLVAQYDKTHNKRLPEGLAGSVEGKINNLDDKATSRLETLRFNGEANIPFEYYLPQVLTVGTEWVEDRFKDNVSTTQGKDSSGSGYGDQLAKGDRSKMESRIASAYIEDNLKVTDSTDVVLGLRFDDHSKSGSNWSPSLNITQXLNDYFTLKGGVAKAYKAPNMYQNAEGYLLSTNGNGCPANIESRCLLQGNGDLKPETSVNKELGIQFQKDIVNASLTWFRNDYKDKIVAGTHVVGTVDGSSTNANTGAVTNTKWNILRWENTPKALIQGFEGSLGLDFGDIRWTNNFTYMMDSKDKQTGNPLSLVPNYTINSIFDYDITDQLDVNFVFTQYGRQKSRQFAENRLESGIGSGGANSALKPSTVKSYSTAGINVGYKFSDQISTRVGVSNLFDKQILRDSNSISQTYNEPGRAYYASLKYSF

SEQ ID NO: 6015 - DNA, 300 bp, Acinetobacter baumannii
  misc_feature (100)..(100): n is a, c, g or t
atgttgttgagtttagatgcttataaacaacaacagtttgatcaaattgctgcaaaaattatagctgagcctgcaaaatatatagattttaattcagtancggatttttataacgctgcttggctcaaggactttccacaagggacccaagtctctgcgacaggtttagatgatggggctgaagagttttatgccgtagtacagtttaaacagcagtacttaaagtttgatattaaagaaaatcattcaacactgagttttcagaatatgaatggtgaaacttttaagtgtaatttttaa

SEQ ID NO: 6016 - protein, 99 aa, Acinetobacter baumannii
  misc_feature (34)..(34): Xaa can be any naturally occurring amino acid
MLLSLDAYKQQQFDQIAAKIIAEPAKYIDFNSVXDFYNAAWLKDFPQGTQVSATGLDDGAEEFYAVVQFKQQYLKFDIKENHSTLSFQNMNGETFKCNF

SEQ ID NO: 6017 - DNA, 999 bp, Acinetobacter baumannii
  misc_feature (623)..(623): n is a, c, g or t
gtgaaactgattgcccaaaaaactgttcctacccatattatttcagggtttttaggggcagggaaaacgacattattgcaacatttattaagtcagaaaccgaaagatgaagtgtgggctgtcttaatgaatgaatttgggcaaatcggagtcgatcaacaactcctacctcaagatcaaggttatgcagtcaaagaactattgggcggctgtttatgttgtagtagccaacttcctatgcatattgctttggctcgcttgttaagtgaacaaaagccagaccgactctttattgaacctacagggcttggacatccttcgcaattatttgatcagttaacggaaccacattggcaaaacagcttagctatgcgtgcactagtgactgtggttgatggtagtcgtctgcatgacaccaattgggtcaagcaaaacctatatgaagaccaattaaaagctgcacagattgtggtggtctctcatgccgataccatgacttttgaagatgaacaggcacttgttgagcttaaagaagaataccaaccttatcagcaacaatggctaaagactgaacatggtcaacttgaactggcgcaaattgatgtgcctgcgcgtttaactgnacggtctatacaacctttacttaagctgcaaaagcaaatgaccgaagccgaagttgtaaaagaaattcaccaactgccttatcattatgttgagacggcgcagggttatatggtcgcgggttggaaatttcctaagcgttggaaatttgagttttatgctttgctcgatgtgttgtgtgcacaacaagactggctacgtattaagggaatttttaatacagatcaggggtggaagacctttaactttaatcctgagcagtttaactataagtctggtgaagagggcattgataaccgcattgaaatgattagccaacatgaacatgactggctggcatttgaaactgaactattagcttgcagaattgaacaatag

SEQ ID NO: 6018 - protein, 332 aa, Acinetobacter baumannii
  misc_feature (208)..(208): Xaa can be any naturally occurring amino acid
MKLIAQKTVPTHIISGFLGAGKTTLLQHLLSQKPKDEVWAVLMNEFGQIGVDQQLLPQDQGYAVKELLGGCLCCSSQLPMHIALARLLSEQKPDRLFIEPTGLGHPSQLFDQLTEPHWQNSLAMRALVTVVDGSRLHDTNWVKQNLYEDQLKAAQIVVVSHADTMTFEDEQALVELKEEYQPYQQQWLKTEHGQLELAQIDVPARLTXRSIQPLLKLQKQMTEAEVVKEIHQLPYHYVETAQGYMVAGWKFPKRWKFEFYALLDVLCAQQDWLRIKGIFNTDQGWKTFNFNPEQFNYKSGEEGIDNRIEMISQHEHDWLAFETELLACRIEQ

SEQ ID NO: 6019 - DNA, 1335 bp, Acinetobacter baumannii
  misc_feature (1163)..(1163): n is a, c, g or t
atgtctgctgccaaaatcggattattgtctcttacagcgctggtctttagttctatggtggggtcaggcgtatttagcctcccccaaaatatggctcaagttgccaacggctctgcccttcttgttgcatggctcattactggggtcggcattattttcttggctctctcattgttgcatttaacccgtcaacgaccagatctagatggcggtatttataactatgcacgcgaaggctttggagacctgatcgggttttgctcggcgtggggttactggttgtgtactaccattggtattgtcggttatgtagtgattgccttttcaggcgtcggcatgtttaccgacagcaaagaccacgttatttttggtgaaggtaatacgctctactcactgattggatcaagcatttttgtatggctggtgcactggttagtaagccgaggtattaaggaagctgcaattgtgaatttactggcaaccattgccaaaattattccaatggtggtctttatcttctttacttttattgcctttaagtttgatttattcaaactcaacttaaatgacttctctttaaaagttcccctttggcagcaagtaaaagacctgatgctcattaccctttgggtatttaccggtattgaaggtgcagtggttttatcatcacgtgcaaaaaaccgtcatgacattggcaaagcgaccattttaggtgttttactggcattaagtttttacgtcatggtcacagtattagcttatggtgtggtgagccgtgaagcgcttgcaggcatgcacaacccatctatggcgaccattttgcagcaactcatcggtctaccgggtaccatcattattactatcggcttgattatttcagtttcatcgtcttatttaagctggacgttatttgccactgaaattccatatttagctgcaaaaaatggtgctttcccgaaactatttttaaagaataaccaaaataatgtgccgatttcatcactatggctaactactattgtggtgcaaggttctttgattgccgtgtatttttttaataaaaactacactcagcttttattgatttcatcggtaatgattttgctaccttattttctggtatcggctttttatcttaaagaatctattcgccacaaacgcangccacatattgccattgcaagtgtcgcttcaatctatgcactttggttgctctatgcagcaggtttagacttacttctgttgtctggtgtgttgtatttggtgggcttggttattttttcaatcagctactttgagcataaaaaatcgctcaaacaaaaccagcttaattaa

SEQ ID NO: 6020 - protein, 444 aa, Acinetobacter baumannii
  misc_feature (388)..(388): Xaa can be any naturally occurring amino acid
MSAAKIGLLSLTALVFSSMVGSGVFSLPQNMAQVANGSALLVAWLITGVGIIFLALSLLHLTRQRPDLDGGIYNYAREGFGDLIGFCSAWGYWLCTTIGIVGYVVIAFSGVGMFTDSKDHVIFGEGNTLYSLIGSSIFVWLVHWLVSRGIKEAAIVNLLATIAKIIPMVVFIFFTFIAFKFDLFKLNLNDFSLKVPLWQQVKDLMLITLWVFTGIEGAVVLSSRAKNRHDIGKATILGVLLALSFYVMVTVLAYGVVSREALAGMHNPSMATILQQLIGLPGTIIITIGLIISVSSSYLSWTLFATEIPYLAAKNGAFPKLFLKNNQNNVPISSLWLTTIVVQGSLIAVYFFNKNYTQLLLISSVMILLPYFLVSAFYLKESIRHKRXPHIAIASVASIYALWLLYAAGLDLLLLSGVLYLVGLVIFSISYFEHKKSLKQNQLN

SEQ ID NO: 6021 - DNA, 786 bp, Acinetobacter baumannii
  misc_feature (760)..(760): n is a, c, g or t
atgtcaaaccgtcaaagatttaccgataaagttgtgattgttacgggtagtggccaaggtattggccgcggcgtggcattgcaagttgcagctgaaggtggacaagtcgtcatggctgaccgctctgaatatgttgaagaggtactcacagaaattcagcgtacaggtggtgatgctgtcacggttaatgctgacctagaaacctatgcaggtgcacaagcggttgttacaaaagccatcgaacattatggtcgggtagatatcctgattaataacgtaggcggcgcgatctggatgaaaccttttgaagagttttccgaagaagagatcattaaggaagtgaatcgctcattgtttccaactttatggtgctgccgcgctgtgttgcctgccatgattaagcaacaagcgggcgttattgtaaatgtatcttccattgcaacccgtggtattaaccgtattccctactccgcatctaaaggtggggtaaatgccctaacagcgtctcttgcttttgaacatgctaaagacgggattcgagtcaatgctgttgcgactggtggaaccgaagcgccacctcgcaaagtaccacgcaatgccaacccgttaagtcaaaatgaaaaagactggatgcaacaagtagttgatcaaacaaaagatcgaacatttatgggccgttatggcacaattcaagaacaagtcaatgcaattttatttcttgcatcagacgaagcatcgtatatgacgggatcggtcattncggtcggaggtggagatcagggttaa

SEQ ID NO: 6022 - protein, 261 aa, Acinetobacter baumannii
  misc_feature (254)..(254): Xaa can be any naturally occurring amino acid
MSNRQRFTDKVVIVTGSGQGIGRGVALQVAAEGGQVVMADRSEYVEEVLTEIQRTGGDAVTVNADLETYAGAQAVVTKAIEHYGRVDILINNVGGAIWMKPFEEFSEEEIIKEVNRSLFPTLWCCRAVLPAMIKQQAGVIVNVSSIATRGINRIPYSASKGGVNALTASLAFEHAKDGIRVNAVATGGTEAPPRKVPRNANPLSQNEKDWMQQVVDQTKDRTFMGRYGTIQEQVNAILFLASDEASYMTGSVIXVGGGDQG

SEQ ID NO: 6023 - DNA, 1029 bp, Acinetobacter baumannii
  misc_feature (652)..(652): n is a, c, g or t
atgctgttaaaagttggtgaattggctaagcaaacaggacttactgtccgtgctcttcatcactatgacgatatcggtttacttcagccttcggcccgttccgatgctggttatcgactatatacccctaaagacattactcgtttgcatcaaattcaagcattacgagggctgggtatgtcgctagctgaaatctatacggttcttgaagatcccaatctagcacttttaccgattattgatcggcagattcaagcaattgatcaaagactggcagagcagaagaaattgcgaaatcagctaggacaattgaaatctcagctcatcaatggtgaagaacttgatttggaggattggctaaatatgctggagcttatagcaatgtacgagaaatactttacgcaagaagaacttgaaaagcttacatttttacaatcaggtactaaaacccaccaagaatggcaagagttaactcaagctgtaaatacggtatttaatgctggagaatcatctagcagtgaaaccgctcaaaagctcgcccataagtggatgaaaacacttgagcaaaatacgcgcaccaatccagaatggcttgttaaattaaataacatcaattctgcagaacctgaatttcaggaaaaattaggggtantgccagaagttgttgactttttacttagggccttttcagagagtaagctgagtatttttgctcgttatttatctgataatgagtttgcttttttaaaggaaaattatggtcgcgagatgaaaaaatggcctcaactattagtcgatattgagaaattgattgacgctgaggttaaaccgaatagtgaaggagcaaagcgtttggcacagcaatggctctctatgctacaaggttatactggcgaaaatccaagtactcaagaaaagatccgtacagcaatgcaaaatgaaccaagccttgctgacggtacttggcttaaaccggttaccctacactttctagaaaaagcagtagcagcattcaagcatagtgcttag

SEQ ID NO: 6024 - protein, 342 aa, Acinetobacter baumannii
  misc_feature (218)..(218): Xaa can be any naturally occurring amino acid
MLLKVGELAKQTGLTVRALHHYDDIGLLQPSARSDAGYRLYTPKDITRLHQIQALRGLGMSLAEIYTVLEDPNLALLPIIDRQIQAIDQRLAEQKKLRNQLGQLKSQLINGEELDLEDWLNMLELIAMYEKYFTQEELEKLTFLQSGTKTHQEWQELTQAVNTVFNAGESSSSETAQKLAHKWMKTLEQNTRTNPEWLVKLNNINSAEPEFQEKLGVXPEVVDFLLRAFSESKLSIFARYLSDNEFAFLKENYGREMKKWPQLLVDIEKLIDAEVKPNSEGAKRLAQQWLSMLQGYTGENPSTQEKIRTAMQNEPSLADGTWLKPVTLHFLEKAVAAFKHSA

SEQ ID NO: 6025 - DNA, 318 bp, Acinetobacter baumannii
  misc_feature (311)..(311): n is a, c, g or t
atgaataaaatgcatgtaactttggctgtagtggttggtttaattattggtggtgtagtcggtgcaataggttactctaaaacggccgcacgttatgatgcgatgaccaccgcatgtgtaatggtgaatcaggcagttgaacatgaaatcttgaagcctgaacaagtgaaagagttaggtgagctcacaggtcaaacccttaaaaaagattatgcttctgttgcatcaaaatttaagttttctgaaaagcaattaggtaatgcttctgaaggttcaaattgtagtcagtttattgttggtgtgaacgcagnacagtaa

SEQ ID NO: 6026 - protein, 105 aa, Acinetobacter baumannii
  misc_feature (104)..(104): Xaa can be any naturally occurring amino acid
MNKMHVTLAVVVGLIIGGVVGAIGYSKTAARYDAMTTACVMVNQAVEHEILKPEQVKELGELTGQTLKKDYASVASKFKFSEKQLGNASEGSNCSQFIVGVNAXQ

SEQ ID NO: 6027 - DNA, 1812 bp, Acinetobacter baumannii
  misc_feature (811)..(811): n is a, c, g or t
gtgttgaaaaatttatggaccatccaagactggaaaacagcatatcaaaacggacaaatccatcttaaggatctgattggctatgtggcagaaattcaaaatgatgatcatgcatggattgaaattgcatcgaacgagcagatgcaggcacaaattgatattttaaaagaccagaatgttgctgacttacctctatatggtgtgccatttgcagttaaagacaatattgatgttgctggatttcacactactgctgcttgtaaagaggttcaatatttagcgaaccaagatgctgccgtagttgccaagctgaaaaaagcaggggcgattgtggtcggtaaaaccaaccttgatcagtttgcaacgggactggttggtgttcgttctccctatggtgcagtaaaaaatagttttaaccccgaatatatcagcggtggttcaagctctggttcttcggtagtggttgccaacggtattgtaccttttagtttggggacagacacggcggggtcagggcgtgtacctgcgggccataacaatattgtgggccttaaacctacaaagggctggttttctaccacaggtttaattcctgcatgtcggactattgatgtcatttctatttttgccttgcatgttgatgatgcttggacagttgccagtttaatgcagggctacgatgaaacagatgaatattcacgagtacatccagccaatgtaccgaatcagttttctaaacgaaaaatagctattccaactcagcttgagttttatggtgatcttgaatctgaaaaagcttttttagttgcanttgagcgcgtaaaaaaactgggctatgacgttgagagtattgatttcagcgcgtttaatgagcttgctgccgcactgtataacgatgcatgggtggcagaaagaacagtcgccgttgaacgcatgaccacacgtgaaaaggctcatccagtcattgctcaaattattgcgcaggcagataaattcaaggcaacagatgcacttcaagccgaatataaccgcgccgttctggctcgaaaaattaatttggctttacagccttttgatgcattaatggttccgacagcgccaaccatttataccattgccgaagttgaagccgatccgttgactaaaaatgcacacatgggggcctataccaactttgttaattttgctgatctttcggctttagctttacctaatgtactccgtgaagatggtctaccaagtggggtaaccttcattgcaccagcttggcacgatcaggcactcgctaattttgcgcagctttggcaaaccgaaacatcgctgagtttaggtaaatcaactcaacattatcaaaaaagtataaacatccagtcgaatcattcagtgcagcttgctgttgtgggagcacacttaacaggcatgccacttaattttcagctgactagccgcaatgcaactttgcttaagaaaacccagaccgcagagacttataaactctttgccttaaaaaataccacgccaccaaagccggggctgcaatgcgatgcagcaggtacttcaattgaagttgaagtatgggatgttccattagcaaattttggagccattgtggctgaagtacctgcacctcttggcattgggaacttgaaattaaaagatggaacatgggtcaaaggcttcatttgtgaagcgtatgccattcaagatgcaaccgatattagccattttggaggctggcgagcttacatacagtcactcaatcaaaccgctcaaagtgttgttagtaaaaatgttggggaagtttctatatga

SEQ ID NO: 6028 - protein, 603 aa, Acinetobacter baumannii
  misc_feature (271)..(271): Xaa can be any naturally occurring amino acid
MLKNLWTIQDWKTAYQNGQIHLKDLIGYVAEIQNDDHAWIEIASNEQMQAQIDILKDQNVADLPLYGVPFAVKDNIDVAGFHTTAACKEVQYLANQDAAVVAKLKKAGAIVVGKTNLDQFATGLVGVRSPYGAVKNSFNPEYISGGSSSGSSVVVANGIVPFSLGTDTAGSGRVPAGHNNIVGLKPTKGWFSTTGLIPACRTIDVISIFALHVDDAWTVASLMQGYDETDEYSRVHPANVPNQFSKRKIAIPTQLEFYGDLESEKAFLVAXERVKKLGYDVESIDFSAFNELAAALYNDAWVAERTVAVERMTTREKAHPVIAQIIAQADKFKATDALQAEYNRAVLARKINLALQPFDALMVPTAPTIYTIAEVEADPLTKNAHMGAYTNFVNFADLSALALPNVLREDGLPSGVTFIAPAWHDQALANFAQLWQTETSLSLGKSTQHYQKSINIQSNHSVQLAVVGAHLTGMPLNFQLTSRNATLLKKTQTAETYKLFALKNTTPPKPGLQCDAAGTSIEVEVWDVPLANFGAIVAEVPAPLGIGNLKLKDGTWVKGFICEAYAIQDATDISHFGGWRAYIQSLNQTAQSVVSKNVGEVSI

SEQ ID NO: 6029 - DNA, 945 bp, Acinetobacter baumannii
  misc_feature (916)..(916): n is a, c, g or t
atgggttatgttgcaaaggaatttacgcaaaagaacaagctgattctcagtatttgttctttcgtgattccaatatgtctttggtgcgcaatcagttacttaccttttgtttggcatcctcaagtacaaatcacaagttcgggaagtgtttcttacttacaagtaggaagtcgcgttgataaaaatgtgttctatctcgaagcacaaaatgcagtcaatcgagattctgcaccaccacaaggtattttagtcaatccaatttatttacccgctccccatgaagtcgctaaggctttggtcaccgcatttaccacaccacctgaacaacctgattcgccatggtttcatcaaagtttatggcacagtattaaactggtattttcagctttttttatctcttccttaattgggattccactgggtattttgtgtggtttttctaagcggatatccctgttaatagaaccgtttgtcgaatttttccgttacttacccgctcccgcctttggtgcccttgcagtggcaattttagggattaatgacgcacctaaaattgccattattgtgattggtacgctctttcagcaaattctcattattgccaataccacccgaatggttgatcgaagcttaattgaagctggctatacgcttggcaccaataagctcaaaagtttatttcacgtggtgattcctgctgcgttacctgatatttaccgtgacttacgtgtgctattgggctgggcatggacctatttaattgtttcagagttgattggtacgacctcgggtattacatggtttatcacccaacaggcacgctatcaaaactttgacaatgtctatgcggccattttgattattggggtgattgggctggtctgtgattggttattaatgaagttaggtgagcggntgttcacttggaaagtaggagcaaaataa

SEQ ID NO: 6030 - protein, 314 aa, Acinetobacter baumannii
  misc_feature (306)..(306): Xaa can be any naturally occurring amino acid
MGYVAKEFTQKNKLILSICSFVIPICLWCAISYLPFVWHPQVQITSSGSVSYLQVGSRVDKNVFYLEAQNAVNRDSAPPQGILVNPIYLPAPHEVAKALVTAFTTPPEQPDSPWFHQSLWHSIKLVFSAFFISSLIGIPLGILCGFSKRISLLIEPFVEFFRYLPAPAFGALAVAILGINDAPKIAIIVIGTLFQQILIIANTTRMVDRSLIEAGYTLGTNKLKSLFHVVIPAALPDIYRDLRVLLGWAWTYLIVSELIGTTSGITWFITQQARYQNFDNVYAAILIIGVIGLVCDWLLMKLGERXFTWKVGAK

SEQ ID NO: 6031 - DNA, 606 bp, Acinetobacter baumannii
  misc_feature (209)..(209): n is a, c, g or t
atgaaaacttatgcacaaaattcagaagcaaatttgggtcagaccttaagagcatctttcggacttctaatttttacccttgtcggttgtggtgctatttatagtgcgatcgctacaggcgtgggacaggttttatttaacaatcaagcgaatggtagtttgattgaaatagaccataaagttctagggtcaaaattagtcgctcagcnatttattggagaggcttattttcatccacgtccttcagcggttgcttatgacccgatggccatgggcgccacaaacttagcccttaccaatccagagcttcaaaaacaaattgatgcacagattcttgaagtgaaaaaacaagaccatacgggcagtacagctattccaagtgatttggtgactaaatcaggtagtggtatcgatccgcatattagccctgaatctgctcagttacaggttgccagagtggctcaagcgcgtcatttagaccctaaagttgtagaagagttattacaaaagcatattgaaccagttcagtttggtgtactagggcaagctcgtgttaatgtattagagctaaatatcgctttagatcaattacaatctatacattaa

SEQ ID NO: 6032 - protein, 201 aa, Acinetobacter baumannii
  misc_feature (70)..(70): Xaa can be any naturally occurring amino acid
MKTYAQNSEANLGQTLRASFGLLIFTLVGCGAIYSAIATGVGQVLFNNQANGSLIEIDHKVLGSKLVAQXFIGEAYFHPRPSAVAYDPMAMGATNLALTNPELQKQIDAQILEVKKQDHTGSTAIPSDLVTKSGSGIDPHISPESAQLQVARVAQARHLDPKVVEELLQKHIEPVQFGVLGQARVNVLELNIALDQLQSIH

SEQ ID NO: 6033 - DNA, 2034 bp, Acinetobacter baumannii
  misc_feature (1382)..(1382): n is a, c, g or t
atgaatacacaaactcatgtaaatagccataaacaaaccatggcagtgccaaattttgaagtttggaaaaatgcatttgtgaaactgctaccacagcatgcaattaaaaaccctgtgatggcaattgtatggcttggaacagtggttacaggcattagtacaatcttaggttacaccacgctgatatttggtttagtggttacagcaattctgtttattaccattttatttgctaactatgccgaggctgttgcagaggctagaggccgtgggcaagcatcttcactacgtgcagcgagagaaaatttaatggctcgaagacttaactctttgacagaccgtcaagcgactcaagttgcagcgaccgaacttcatttaaatgattttattgaagtacatgcaggtgagcttgttccagccgacggtgagattgtagaaggctttgcgaccattaatgaatcggctgttacaggtgagtcagcacctgtgctacgtgaagctggaacagaccgttcaggtgttattggcggaaccaaagtacttacagatcgtattgttgtgcaagtgactgctgaatctggtcaaagtttcttagaccgtatgattgctttggtcgaaggttcaaatcggcaaaaaacaccgaatgagattgcacttggcttcttattaatagtgatgacaatcacgtttttaattgtcgtgattagtttgccatttattgctgattatctacatattgaacttgatccagtcgtgctcgtggcgttattggtctgcttaattccaacaacgattggtggtttgttacctgcgattgggattgcgggcatgaaccgtgcactcaaagccaatgttttggcgaaatcaggtaaagcagtagaagtcgcgggtgacattgatgtgcttttactcgataaaacaggaaccattacttatggtgatcgtcaagcgacctctttttatcctttaacttcggtaaccgagtcagagttgagagctgctgcttggataagttcacttgccgacccaacaccagaagggaaatcaattgttaagttagcaaaagagcaaggtctaaaacagcaagaacctgagcaagccgaatttatctcttttagtgcttcgactcgaatttctggcgtgaatttaccgaatggtgaccaaattcgtaaaggtgcattagatgcaattttgaaatttgtagatgaggattattctcaagatttagaattaaaatcgcgtgttgaacaagttgccaaaaaaggagcaacacctttagtcgtcgctaatcaacatcatgtgttgggtgtgattgaactctcagatgtgattaaacacggtattaaagaacgttttgctcgtttaagagaaatgggcatcanaaccgttatggttacaggtgataacccattaactgctgctgcgattgctgctgaagctggtgtagatgactatattgccgaagcaaaaccagaagacaaattggcttgtattcgcaccgaacaacaacaaggtcgtttagttgcgatggtcggtgacggaaccaatgacgcgccggcattagcacaagcagatattggtttagccatgaattcgggcacacaagctgcaaaagaagctggcaatatggttgatttagactcagatccaaccaaactacttgctgtggttgagattgggaaacagcagctgattacccgtggcgctttaacaacattttcgttggcaaacgacgtctctaaatactttgccatcttgcctgcattgttcgctgctgcgattccacaaatgcaagtattgaatgtaatgcacttggcaagtccaaacagcgcgattttatctgcattaatttttaacgcgattattatcccgctattaattccaatcgcactccgaggcgtgaaatttaaaccttcaatggcaactcagttattacgtcgaaatatgttgatttatggtgtgggcggtgtggttctgccattccttgccattaaagcaattgatgtagtgattgttcaattatttggtttgtaa

SEQ ID NO: 6034 - protein, 677 aa, Acinetobacter baumannii
  misc_feature (461)..(461): Xaa can be any naturally occurring amino acid
MNTQTHVNSHKQTMAVPNFEVWKNAFVKLLPQHAIKNPVMAIVWLGTVVTGISTILGYTTLIFGLVVTAILFITILFANYAEAVAEARGRGQASSLRAARENLMARRLNSLTDRQATQVAATELHLNDFIEVHAGELVPADGEIVEGFATINESAVTGESAPVLREAGTDRSGVIGGTKVLTDRIVVQVTAESGQSFLDRMIALVEGSNRQKTPNEIALGFLLIVMTITFLIVVISLPFIADYLHIELDPVVLVALLVCLIPTTIGGLLPAIGIAGMNRALKANVLAKSGKAVEVAGDIDVLLLDKTGTITYGDRQATSFYPLTSVTESELRAAAWISSLADPTPEGKSIVKLAKEQGLKQQEPEQAEFISFSASTRISGVNLPNGDQIRKGALDAILKFVDEDYSQDLELKSRVEQVAKKGATPLVVANQHHVLGVIELSDVIKHGIKERFARLREMGIXTVMVTGDNPLTAAAIAAEAGVDDYIAEAKPEDKLACIRTEQQQGRLVAMVGDGTNDAPALAQADIGLAMNSGTQAAKEAGNMVDLDSDPTKLLAVVEIGKQQLITRGALTTFSLANDVSKYFAILPALFAAAIPQMQVLNVMHLASPNSAILSALIFNAIIIPLLIPIALRGVKFKPSMATQLLRRNMLIYGVGGVVLPFLAIKAIDVVIVQLFGL

SEQ ID NO: 6035 - DNA, 840 bp, Acinetobacter baumannii
  misc_feature (106)..(106): n is a, c, g or t
atgaagaagttaaatcaaataatgtttgcaatgattgcagcttcggcagcattaagtgcaaatgccgctcatgtattggttgtattgtctgatgaaggacagttanagctaaagaataagcaggtttttaaaacgggcttttatcttaatgagttgatgcaacctacaaaaatgcttttagatgcagggcataccgtaacgtttgccactccaaaggggaaagctccaacgttagatgagtcatcaaataatgcaatgtattttaatcaagatgaaaaagcattaaagcagtatgctggtttattacatgatctaaagttaacttctgctcaagattctcctgttgtaagtctggcgcgtattgagcaaattggtatagatcaatttgatgctatttatattccgggcggacatgcgcctatgcaagacctattaaaagataaacaacttggaaaagtacttacagctttccataaagctggaaaacctacagctttggtttgtcatgggcctatagctttgatgtcagctttacctcatgctgcggaagccgttaagcaacttgaacaaggtaaaaaagttaaaactggagaatggatttataaaaattatcggatgacagtaattagcaatcaagaagaagagcaagcgaagggcttattaaaaggcggtgagatgaagttctatccacaaactgcattagagtcacttggagcaaaatatcaaagcaatacgaaagcttggtcgccaaatgtagtggtggatcgtgaacttattactggacaaaatccagcttcggctgttcttgtcggtaaatctttattagaaaaattaaaataa

SEQ ID NO: 6036 - protein, 279 aa, Acinetobacter baumannii
  misc_feature (36)..(36): Xaa can be any naturally occurring amino acid
MKKLNQIMFAMIAASAALSANAAHVLVVLSDEGQLXLKNKQVFKTGFYLNELMQPTKMLLDAGHTVTFATPKGKAPTLDESSNNAMYFNQDEKALKQYAGLLHDLKLTSAQDSPVVSLARIEQIGIDQFDAIYIPGGHAPMQDLLKDKQLGKVLTAFHKAGKPTALVCHGPIALMSALPHAAEAVKQLEQGKKVKTGEWIYKNYRMTVISNQEEEQAKGLLKGGEMKFYPQTALESLGAKYQSNTKAWSPNVVVDRELITGQNPASAVLVGKSLLEKLK

SEQ ID NO: 6037 - DNA, 981 bp, Acinetobacter baumannii
  misc_feature (328)..(328): n is a, c, g or t
gtgaataatctacctaacctatcggatttaaaggttttttgcacagtcgccaaactaaaaagttttgtcgaatctgctgaggaacttgggacatcgccagcttttattagcaagcgaattaatattttagaaaacacgttgagctgcaaactttttcatcgcagcacacgtcacgttagcctgacggaagatggcaaacttattcttgaaagagtttcaaatattcttgaagaatttgatgaagtttgtgaactggtcaataacccgcttagtacgcccacaggtcgtatggacattattagtagctttggttttggcagaaagcatntcgcacctattctgtctaaattaatgatgctttatccaaagcttcagattcattttgacaccatcgacaataccaaagacctgattcaacacagcattgatttagacatcagaattggtaatgaaattgcgccaaacatgattgcgaagaagctggcttctaattttcgtattttgtgtgcgtcaccgagttatttacttaaacacggcgtacctgacagtattgaagatttgcaaacacatgactgtttaacaattagtgaacgcgaccaatcctcggttttatggaaatttaggcatgcttccgaagatgtctcagtgcatatcaaaccccgctttgtttcaaataacggcgaaattattcatcaacttgccatagaaggtcacggtattattttccgttcgatttgggatgttgcagatgaattgattaccggccaacttcagcatattttgcctgagtactggcaagatgcagatgtctgggcagtttatccatcacgactcaaaagctcctccaaactgcaaacctgtattttgtttattcaaaacgaattgctcaatcgtttacagcatgtgcaaaacctaagccgtggacaacttatttcaccagcggtcaaacgagaaccaccgcctgaaaaagtctttctataa

SEQ ID NO: 6038 - protein, 326 aa, Acinetobacter baumannii
  misc_feature (110)..(110): Xaa can be any naturally occurring amino acid
MNNLPNLSDLKVFCTVAKLKSFVESAEELGTSPAFISKRINILENTLSCKLFHRSTRHVSLTEDGKLILERVSNILEEFDEVCELVNNPLSTPTGRMDIISSFGFGRKHXAPILSKLMMLYPKLQIHFDTIDNTKDLIQHSIDLDIRIGNEIAPNMIAKKLASNFRILCASPSYLLKHGVPDSIEDLQTHDCLTISERDQSSVLWKFRHASEDVSVHIKPRFVSNNGEIIHQLAIEGHGIIFRSIWDVADELITGQLQHILPEYWQDADVWAVYPSRLKSSSKLQTCILFIQNELLNRLQHVQNLSRGQLISPAVKREPPPEKVFL

SEQ ID NO: 6039 - DNA, 2715 bp, Acinetobacter baumannii
  misc_feature (242)..(242): n is a, c, g or t
atgagcgtatcggaaatccgaccgattgccattgaggacgaactcaagcattcatatttagattacgcgatgagtgtaattgtatctcgtgcattgccggatgtgagagacggtcttaaacctgttcaccgtcgtgtgctttatgccatgcacgaattgggcaatgactataacaaagcctacaagaaatctgctcgtgtcgttggggacgtaatcggtaaatatcacccgcatggtgactnagctgtttatgaaaccattgttcgtatggctcaagactttagcttacgttatttattggttgatggtcagggtaacttcggttcgatcgatggtgatagcgctgcggcaatgcgttataccgaagtccgtatgactaagctggcacatgagcttcttgcagatttagaaaaagacacagttgactgggaagataactacgacggttcggaacgtatccctgaagtacttccgacacgtgttccaaacttgttaattaacggtgctgctggtattgctgtaggtatggcaactaacatggcaccacacaacatgacagaagttgtgaatgcatgtttggcttatgctgacaatccgaatatctcgattgaaggattgatggaatacattactggtcctgacttccctacaggcggtattatttacggtaaatcaggtattgttgatgcctaccgtaccggtaaaggtcgtttacacattcgtggtaaataccatttcgaagaagatgaaaagacaggtcgtacaaccatcgtctttactgaaattccatatcaagtaaacaaagcaagagttattgaacgtattgccgagttagtaaaagagaaaaagcttgaaggtatttcagaacttcgtgatgagtctgataaagaaggtatgcgtattgcaattgacttgaaacgcggtgaaaacgcagaagtcgttgtaaataacttattcttaaatacccagcttgaaaactcattcagcatcaacatggtttgtctagacaatggacaaccaaaattgatgaatctaaaagatattattgcggcatttattcgtcaccgccaagaagttgtgacacgccgtaccatgttcgaattacgtaaagcacgtgaacgtggtcatatcttggaaggcttgacagttgccttagccaatattgatgaaattattgaaaccatcaaaacttctgcaaaccctgctgaagcgcgtgagcgtttacttgcgggtgagtgggcaggtggtggcgttgttgcactacttgaaaaagctggtgcaatttctgttcgcccagatgaaattgaaggtgaagatccaaatcgtccatttggtttaagtgattcaatttaccgtctgtcaccaacacaagtaggcgcaattttagaattacgtttacaccgtttaactggtcttgaacaagacaagttacatgcggaatatactgaaattttaggtcaaattgctgaacttactgcaattttaaatgactttaacttgttaatgggtgttattcgcgaagagttggcacaagttttacaacaatatggcgatgcacgtcgtaccgaaattgttgaatctcgtgttgatttctgccgtgaagatttgattcctgaagagcaagtggtattaactgtttcacaaacgggttatgcaaaaactcaaccactttcagactatcaggcacagcgccgtggtggacgtggtaagtctgcaacctcaatgaaagatgatgactttattcaacatctgattgtggcatcgaaccatgcgaccgtactttgctttaccaatgtgggtaaagtgtaccgtctgaaagtatttgaagttcctcaagcatcacgtggggcaaaaggtcgtccaatcgtgaacttgttacctctagatgcaacagaaaccgtaaccgcaatcttgccgttaaccgagttcccggaaaaccactatgtgtttatggcgacagcttctggtacggttaagcgtgttgagttagaacaatttgcaaacattcgttcaaatggtctacgtgctattgaacttaatgaagaagataccttaattggtgttgcgattactgatggtaatcagcaaatcatgttgttctctaacgaaggtaaagcaattcgttttgctgaaactgacgtacgtgcaatgggtcgtacagcgaaaggtgtacgtggtatgcgtgtaagctttgcaagcagcaccttaagtgaagaagatgcagatgttgaaaatgatgattcagatgataatgatgattcagcagattcaagtctagtaagtcgcatcgtatcgcttgttgttgtacctgagacaggcgaagtactgtgcgcgagtgccaacggttatggtaaacgtactccagtaaatgacttcccgaccaagaaacgtggtggtaagggtgttattgcgatcaagacaagtgaacgtaacggtgagctagttggtgcagtttctattgatgaaaccaaagagttattattaatttctgatggtggtacgcttgttcgtacgcgtgctgcagaagttgcaatgacaggccgtaatgctcaaggtgttcgtctgatccgtttaagcgaagaagaaacgcttgttggcgtagtttcaattgaagctgtagaagacgaagaagaacttcttgaaggtgaagtagatacgactgaaactgatagcgaagaagctgtatctaataatgaagatacttctgaagagtaa

SEQ ID NO: 6040 - protein, 904 aa, Acinetobacter baumannii
  misc_feature (81)..(81): Xaa can be any naturally occurring amino acid
MSVSEIRPIAIEDELKHSYLDYAMSVIVSRALPDVRDGLKPVHRRVLYAMHELGNDYNKAYKKSARVVGDVIGKYHPHGDXAVYETIVRMAQDFSLRYLLVDGQGNFGSIDGDSAAAMRYTEVRMTKLAHELLADLEKDTVDWEDNYDGSERIPEVLPTRVPNLLINGAAGIAVGMATNMAPHNMTEVVNACLAYADNPNISIEGLMEYITGPDFPTGGIIYGKSGIVDAYRTGKGRLHIRGKYHFEEDEKTGRTTIVFTEIPYQVNKARVIERIAELVKEKKLEGISELRDESDKEGMRIAIDLKRGENAEVVVNNLFLNTQLENSFSINMVCLDNGQPKLMNLKDIIAAFIRHRQEVVTRRTMFELRKARERGHILEGLTVALANIDEIIETIKTSANPAEARERLLAGEWAGGGVVALLEKAGAISVRPDEIEGEDPNRPFGLSDSIYRLSPTQVGAILELRLHRLTGLEQDKLHAEYTEILGQIAELTAILNDFNLLMGVIREELAQVLQQYGDARRTEIVESRVDFCREDLIPEEQVVLTVSQTGYAKTQPLSDYQAQRRGGRGKSATSMKDDDFIQHLIVASNHATVLCFTNVGKVYRLKVFEVPQASRGAKGRPIVNLLPLDATETVTAILPLTEFPENHYVFMATASGTVKRVELEQFANIRSNGLRAIELNEEDTLIGVAITDGNQQIMLFSNEGKAIRFAETDVRAMGRTAKGVRGMRVSFASSTLSEEDADVENDDSDDNDDSADSSLVSRIVSLVVVPETGEVLCASANGYGKRTPVNDFPTKKRGGKGVIAIKTSERNGELVGAVSIDETKELLLISDGGTLVRTRAAEVAMTGRNAQGVRLIRLSEEETLVGVVSIEAVEDEEELLEGEVDTTETDSEEAVSNNEDTSEE

SEQ ID NO: 6041 - DNA, 777 bp, Acinetobacter baumannii
  misc_feature (757)..(757): n is a, c, g or t
atgcgtcgtagtgaaaaatcgaaagacaccaaagccagactcgcacccaagcaaaagatcagttatgaaaagaaaccggatccagcgattacagcctatgctgtgcaatctctaaactggttacgccaagctgaatttttaatgagtgctccgaaattggcactatgtgttgaagatagtggctacgagattgcgtttgccggacgttcaaatgcaggaaaatctagcgcaattaatgcattaacaaaccagaaacagcttgcacgtgcctccaaaaaacctgggcgtacgcaaatgattaactttttcagcctaggtaatccagatcaacgcttagttgaccttcctggttatggttatgcagccgtaccagaagatatgaaacgtgtatggcaaaaagaattagaaaactatctaattcatcgtaaaagcttacaaggtttggttttactcatggatattcgccaccctttacagcactttgacatgatgatgctagagtgggcttattcacgccatttatttgttcatattcttttaaccaaagcagataaactgaaccgcggtccagcgaacaaagtcttgctcgaagttaaacaacaactgaaaaaaatgaagcttgatttctcgattcagcttttttcttcattaaacaaactaggtttagaagagctagcaagtgtgatggctggacgattgcactttacgcttgaacaacagccagaatttgacgttgatacaatcccagaagcgagcnatgaggatgcagaagagtaa

SEQ ID NO: 6042 - protein, 258 aa, Acinetobacter baumannii
  misc_feature (253)..(253): Xaa can be any naturally occurring amino acid
MRRSEKSKDTKARLAPKQKISYEKKPDPAITAYAVQSLNWLRQAEFLMSAPKLALCVEDSGYEIAFAGRSNAGKSSAINALTNQKQLARASKKPGRTQMINFFSLGNPDQRLVDLPGYGYAAVPEDMKRVWQKELENYLIHRKSLQGLVLLMDIRHPLQHFDMMMLEWAYSRHLFVHILLTKADKLNRGPANKVLLEVKQQLKKMKLDFSIQLFSSLNKLGLEELASVMAGRLHFTLEQQPEFDVDTIPEASXEDAEE

SEQ ID NO: 6043 - DNA, 1152 bp, Acinetobacter baumannii
  misc_feature (340)..(340): n is a, c, g or t
atggcgttcagacaatttgaacgcacatctttacagctaagtatgggaaccctgcttagctgtttatgtgcgtcggtggcatatgccgacaccttagcccctgtaaaacctgcgagtgtagatgcatgtgttgcccttgcttcgaatgctgatcgcctagcttgttatgatgctgtgtttaaaccatcggccttaccagtagttcaagccgcagtagtaccagagcctgttaaaaaaattgataaacctgttgttcaacctgaaacatttaaagaaaaggttgtagataaggtaagtaatatcaaagtaattggtaaggcacctacacttgaacctactncgtctttactagatcaacgttgggagttgtctgaaaaaagcaaactgggtgtttggaatattcgtgcttatcaacctgtttacttgctaccagttttctggacgagcgataaaaatgagtttccaagcagtcccaacccaaataatacggtgacagaggcccaaaaccttaaatcaactgaaagtaaatttcagatttctttgaaaacgaaagcttgggaaaatatttttggcaacaatggtgacttgtgggtaggttatacccaatcttcacgttggcagacctttaatgctgaagagtctcgtccattccgtgaaacgaactatgagccagaagcaagtttaatgtttagaacaaactatgagttgcttggcttagatggtcggttgcttggggtaactttaaatcaccagtcaaatggacgttcagatcctttatctcgtagttggaaccgtgtcatctttaatgtgggtttagaacgcggtaactttgctttaatgcttcgtccatggatacgccttgaagaagacagcaaagatgataacaatccagatatggaagattacatcggtcgtggtgatttaactgctttttataaatggaagcaaaatgacttctcattaatgctacgtcactctttaaaaggtggtgatgattctcatggtgctgttcagtttgactgggctttcccgattagtggcaagctgcgcggacacttccaattatttaatggttatggtgaaagcttaattgactataaccatcgtgcaacttatgccggcttgggtgtttcactcatgaactggtactaa

SEQ ID NO: 6044 - protein, 383 aa, Acinetobacter baumannii
  misc_feature (114)..(114): Xaa can be any naturally occurring amino acid
MAFRQFERTSLQLSMGTLLSCLCASVAYADTLAPVKPASVDACVALASNADRLACYDAVFKPSALPVVQAAVVPEPVKKIDKPVVQPETFKEKVVDKVSNIKVIGKAPTLEPTXSLLDQRWELSEKSKLGVWNIRAYQPVYLLPVFWTSDKNEFPSSPNPNNTVTEAQNLKSTESKFQISLKTKAWENIFGNNGDLWVGYTQSSRWQTFNAEESRPFRETNYEPEASLMFRTNYELLGLDGRLLGVTLNHQSNGRSDPLSRSWNRVIFNVGLERGNFALMLRPWIRLEEDSKDDNNPDMEDYIGRGDLTAFYKWKQNDFSLMLRHSLKGGDDSHGAVQFDWAFPISGKLRGHFQLFNGYGESLIDYNHRATYAGLGVSLMNWY

SEQ ID NO: 6045 - DNA, 1407 bp, Acinetobacter baumannii
  misc_feature (62)..(62): n is a, c, g or t
atgcatgatgtaattgtgattggtggtgggaatgccgcactgtgtgccgcgctcacggcaanagaaagtggtgcttctgtgctggtaatagaagcagcgcccaaagagtggcgtggtggtaactcccaacacactcgtaaccttcgctgcatgcatgatgctcctcaagacgtattggtcgatgcttatcccgaagaagaatattggcaagacctacttaaagtcactgcgggcaaaaccaatgaacatttagctcgtctagtgattcgtagcacggcgacttgccgcgactggatgcgtaaacatggcgtgaattttcagccaccactatcgggtgctttgcatgttgcacgtaccaatgccttttttatgggtggaggtaaagcccttattaatgcctactaccgtagtgctgaaaaacttggcattgagattttatacaatacaaaaattaaagacctaaagttaaaccaaggacattttgaagctgcaattgcggaagatggacgtgtatttaaagcaaaaagctgtgtattggccgcaggtggttttgaatcaaatttagaatggttaagagaagcatggggacaaaatgaaaacggcgaatggcctgccgataattttattattcgaggtacccgctttaatcaaggcaacttactcaaatttatgatagatcaaggcgccgatattattggtgacccatcacaatcacattgcgtcgctgtagatgcacgcgcaccattatatgacggcggcatctgcacccgtattgactgcgtttctttgggaattgtggtcaataacaaagccgaacgtttttatgatgaaggtgaagacttctggccaaaacgttatgcgatttggggccgtcttgttgccaaacagccacagcaaattgcctattcgattatcgattcaaaagccattggtcgctttatgccccctgtgtttgcgggtgtaaaagcaaatagcattcaagagttagccgaaaaaatcggactggatgcaaaaaccttatgccataccgtagaagaatttaatcaagcctgtgtgcaaggcacctttaaccataccgttttagatgactgcaccaccgaaaatattattcccaacaaaacccattgggccgttcctctcgaccagccacctttctatgcctatgcccttaaacccggcattacctttacctatttaggtttaaaagtcgaagacgatgctgcggtacgctttaacaataaagccagccgcaatctgttcgtcgcaggtgaaatgatggcaggtaatgtactcggtcagggttataccgcaggtgtcggcatgtcgatcggcacaacctttgggagaattgccggaaaaaatgccgcccactatgcactttcacaaggagttgaacatgaatgctag

SEQ ID NO: 6046 - protein, 468 aa, Acinetobacter baumannii
  misc_feature (21)..(21): Xaa can be any naturally occurring amino acid
MHDVIVIGGGNAALCAALTAXESGASVLVIEAAPKEWRGGNSQHTRNLRCMHDAPQDVLVDAYPEEEYWQDLLKVTAGKTNEHLARLVIRSTATCRDWMRKHGVNFQPPLSGALHVARTNAFFMGGGKALINAYYRSAEKLGIEILYNTKIKDLKLNQGHFEAAIAEDGRVFKAKSCVLAAGGFESNLEWLREAWGQNENGEWPADNFIIRGTRFNQGNLLKFMIDQGADIIGDPSQSHCVAVDARAPLYDGGICTRIDCVSLGIVVNNKAERFYDEGEDFWPKRYAIWGRLVAKQPQQIAYSIIDSKAIGRFMPPVFAGVKANSIQELAEKIGLDAKTLCHTVEEFNQACVQGTFNHTVLDDCTTENIIPNKTHWAVPLDQPPFYAYALKPGITFTYLGLKVEDDAAVRFNNKASRNLFVAGEMMAGNVLGQGYTAGVGMSIGTTFGRIAGKNAAHYALSQGVEHEC

SEQ ID NO: 6047 - DNA, 1044 bp, Acinetobacter baumannii
  misc_feature (1028)..(1028): n is a, c, g or t
atgaaaaagttattaccgacttcaactgctggcagcttaccaaaaccgtcttggcttgcagaacctgaaaagctttggtcgccgtggaaactcgaaaacgaaggcttagttgaaggtaaaaaagacgcgttacgtttagcacttcacgagcaaaaacttgcgggcattgatattgtcagcgatggcgaacaaacccgccaacactttgtgacgacatttattgagcacttgaatggcgtagattttgagaagcgcgaaacagttcgtattcgtgaccgttacgacgcaagcgtaccgtctgtggtaggtgcggtgtctcgtcaaaagcctgtatttgttgaagatgcaaaatttttacgtcagcaaactgatcagccaattaaatgggcgttacccggcccaatgaccatgattgatacgctttatgatggtcactacaagagccgtgaaaagcttgcttgggaatttgccaaaatcttgaaccaagaagcgaaagagttagaagctgctggtgtagatattatccagtttgacgaacctgcatttaacgtattctttgacgaagtaaatgactggggtattgcgactttagaacgtgcaattgaaggcctaaaatgtgaaactgcggtgcacatttgctacggttacggtattaaagccaatactgactggaaaaagacactcggttcagaatggcgccagtacgaagaagctttcccgaaacttcaaacttctaacattgatatcatctcgttagaatgtcacaactctcgtgtgccaatcgacttacttgaacttattcgtggtaaaaaagtcatggtcggtgcgattgatgttgcaacaaaccagattgagacaccggaagaagtggctaacacactacgtaaagcgcttcagtttgtagactcagacaagctttacccgtgcacaaactgcggtatggcgccactttctcgtgaagtggcacgcggcaagctaaatgccttaagtgcaggtgcagaaatcgttcgccgagaactgactggttntgatcttactgcttaa

SEQ ID NO: 6048 - protein, 347 aa, Acinetobacter baumannii
  misc_feature (343)..(343): Xaa can be any naturally occurring amino acid
MKKLLPTSTAGSLPKPSWLAEPEKLWSPWKLENEGLVEGKKDALRLALHEQKLAGIDIVSDGEQTRQHFVTTFIEHLNGVDFEKRETVRIRDRYDASVPSVVGAVSRQKPVFVEDAKFLRQQTDQPIKWALPGPMTMIDTLYDGHYKSREKLAWEFAKILNQEAKELEAAGVDIIQFDEPAFNVFFDEVNDWGIATLERAIEGLKCETAVHICYGYGIKANTDWKKTLGSEWRQYEEAFPKLQTSNIDIISLECHNSRVPIDLLELIRGKKVMVGAIDVATNQIETPEEVANTLRKALQFVDSDKLYPCTNCGMAPLSREVARGKLNALSAGAEIVRRELTGXDLTA

SEQ ID NO: 6049 - DNA, 744 bp, Acinetobacter baumannii
  misc_feature (384)..(384): n is a, c, g or t
atgattaaatcgattatttcaggttgcgcggttcttacactttcagctttaacggtaactcatgcagagttttcttatgaacaagaattacaacaaagctgcaataaagtgaagcaatacgcgagtttaggcaagaaattctacgatcaaaaacaatataaaaaagcgctcgaaaatttccaaaaccaagcctcttggactgctttttgtaaggccaatgcagacgaaaccacaattaaatttaccgaccgtgatattgaagttgctaacaataacgtgggcttagcctatgtcaaattgggtcagccactttgggcaagagcatggtttatgctcgatgaaaaatcaaagtctagtcaatttaaccttaagcagctgcctcancctaaagcatcaaatgatttgtcgggtgaatacgtccgttactcaggttttggtgagtgggatcacatcacggtaagtcgtaaacagggccaatataccattggctattcgggcgtttatatgggcttacgaagcttaatttacggcccaaatatgggtgagtttgacaccaaaatgccgaccaatgccaagcaaactatttataaagatcaagactgccgtattcagctcgattttagaaccaatgcgaagttaggcaattatattcaggttaaacaaagcgaaggagagtcgggttgtggctttggtcataacgtttatgccgatggaacgtatttaaaagttgagtctggaaaataa

SEQ ID NO: 6050 - protein, 247 aa, Acinetobacter baumannii
  misc_feature (128)..(128): Xaa can be any naturally occurring amino acid
MIKSIISGCAVLTLSALTVTHAEFSYEQELQQSCNKVKQYASLGKKFYDQKQYKKALENFQNQASWTAFCKANADETTIKFTDRDIEVANNNVGLAYVKLGQPLWARAWFMLDEKSKSSQFNLKQLPXPKASNDLSGEYVRYSGFGEWDHITVSRKQGQYTIGYSGVYMGLRSLIYGPNMGEFDTKMPTNAKQTIYKDQDCRIQLDFRTNAKLGNYIQVKQSEGESGCGFGHNVYADGTYLKVESGK

SEQ ID NO: 6051 - DNA, 1002 bp, Acinetobacter baumannii
  misc_feature (514)..(514): n is a, c, g or t
atgaaatatagaactttaggacaaacaggcgaaaaagtatcagcacttggtttaggttgcatgggaatgagctttgcttatggtgcctcagatgacacacaaagcattgcaactctagaaaaggccatagacctcggcattaacttttgggacactgccgacatgtacggcaacggcgcaaacgaagttttgctctcaaaagttttagaaaaacatcgcgacaaagtatttttggcgaccaaatttggctttcgttataaagaagataaccttaacccgaaaaactctttagagtcttatatcgacggctcacctgagtggattaaagtcgcggtcgaaaacagtttaagacgcttaaatacagacgtgatcgatttgtattatgcgcaccgcatagacccaaatgttccggttgaagataccattggcgcaatggcagacttggtcaaacaaggtaaagttcgttatttagggctgagtgaagcgtcggctgaaactattcgtaaagcacatncgattcacccgattgcagcggttcaacatgaatattcgctacttacccgtgagtttgagcaaacccatttgcaaaccattcgtgagttaggtattagccttgtgccatattcaccactttcgcgcggtttaatcaccaatacgcttgatgtgaataacctagacgaaaatgatttccgtcgccagttaccacgttatcagggcgataactggaaaaataaccaaagcttggcgcaagcatttagtaaatttgctcaaagcaaaaatgcgacagcggctcaactggctttggcttggattttggcgcaaggtgacgacattattccaattccgggtacgcgtaaaatcgagcgacttgtggaaaatgctggcgctgtagaccttcatttaacagcggcagatttggcagaaattgaagcgattattgcgagatacccaaacatgggcgcacgctataacgctcagcaacttgctgcggtcaaccactaa

SEQ ID NO: 6052 - protein, 333 aa, Acinetobacter baumannii
  misc_feature (172)..(172): Xaa can be any naturally occurring amino acid
MKYRTLGQTGEKVSALGLGCMGMSFAYGASDDTQSIATLEKAIDLGINFWDTADMYGNGANEVLLSKVLEKHRDKVFLATKFGFRYKEDNLNPKNSLESYIDGSPEWIKVAVENSLRRLNTDVIDLYYAHRIDPNVPVEDTIGAMADLVKQGKVRYLGLSEASAETIRKAHXIHPIAAVQHEYSLLTREFEQTHLQTIRELGISLVPYSPLSRGLITNTLDVNNLDENDFRRQLPRYQGDNWKNNQSLAQAFSKFAQSKNATAAQLALAWILAQGDDIIPIPGTRKIERLVENAGAVDLHLTAADLAEIEAIIARYPNMGARYNAQQLAAVNH

SEQ ID NO: 6053 - DNA, 243 bp, Acinetobacter baumannii
  misc_feature (223)..(223): n is a, c, g or t
atgtttaagccatttgaaaagggtactgagtcttcttcaattgaagatttaacattagaaaatgatgtcgattgcgtgagtatttatggcaatttgcaaatcactaaagacaaagtcgggttagagcaggcaaaggcattgcagagttttttaaatgatgtagttgcagctttggaaaaagaagaattgcctgagaaaattgaacgtccagctgaacaagaanttaataatccgtttttgtaa

SEQ ID NO: 6054 - protein, 80 aa, Acinetobacter baumannii
  misc_feature (75)..(75): Xaa can be any naturally occurring amino acid
MFKPFEKGTESSSIEDLTLENDVDCVSIYGNLQITKDKVGLEQAKALQSFLNDVVAALEKEELPEKIERPAEQEXNNPFL

SEQ ID NO: 6055 - DNA, 642 bp, Acinetobacter baumannii
  misc_feature (97)..(97): n is a, c, g or t
atgtctgaagcctctgcccttcttgataaaacttctattcagcagctccctccttttgaaaatcttaaccatcaaaatattgtggtgattgaaaatngcgagcaatgcaaaactattgaagaagaattaagggtagcgacctttttaggatttgattctgaatctaaacctacttttcaggtaggtgaagtatcaactggcccacatttgattcagctggctacagaacacaaagcctatttatttcatgtcaattcatcgactttaaaatttttacagcccattttgtctaatccaaaacaaattaaagtcggctttggccttaaaaatgataagcatatttttcacaaaaaaggcataaagcttgaaagctgcattgaccttgctaaaggttttagccattttggctttaaacaacaaatgggtgtacaaaaagccgtagcactattacttggtcagtatcttgccaagtcgaagaaagttggaacttcaaattgggcgcgaaaaccgcttacttcacaacaaatcagttatgcagctgctgacgcctatgctgccctattggtatttctcgagcttaaaaaacgaaaggtattaccaatacatatttctgaaaagattcaaaccgcacttcaagggtaa

SEQ ID NO: 6056 - protein, 213 aa, Acinetobacter baumannii
  misc_feature (33)..(33): Xaa can be any naturally occurring amino acid
MSEASALLDKTSIQQLPPFENLNHQNIVVIENXEQCKTIEEELRVATFLGFDSESKPTFQVGEVSTGPHLIQLATEHKAYLFHVNSSTLKFLQPILSNPKQIKVGFGLKNDKHIFHKKGIKLESCIDLAKGFSHFGFKQQMGVQKAVALLLGQYLAKSKKVGTSNWARKPLTSQQISYAAADAYAALLVFLELKKRKVLPIHISEKIQTALQG

SEQ ID NO: 6057 - DNA, 378 bp, Acinetobacter baumannii
  misc_feature (341)..(341): n is a, c, g or t
atgtccgtcttattctgtttgcttatattccagagtttatggaatatagcagcggttttttgcgcgcatgaaaatcaagaaaaagcactacatcattttggtcatcatgcagctttaaatgtatatcaaacgtcttctcatacccatgttgaacatactgagactttagatgctgctcataaagcacctttaaacttacaagaccatcatgatcatttaccgacatgttttcatgtcgtcatgacagaagttgcaaaacaagctcaaacccctgttttgcatgtgaatgaactttcacaaatttatcattggtccaattcttaccagtctccacatcttantgccttaaaaccgcctcctgttttaaccccgctatag

SEQ ID NO: 6058 - protein, 125 aa, Acinetobacter baumannii
  misc_feature (114)..(114): Xaa can be any naturally occurring amino acid
MSVLFCLLIFQSLWNIAAVFCAHENQEKALHHFGHHAALNVYQTSSHTHVEHTETLDAAHKAPLNLQDHHDHLPTCFHVVMTEVAKQAQTPVLHVNELSQIYHWSNSYQSPHLXALKPPPVLTPL

SEQ ID NO: 6059 - DNA, 1479 bp, Acinetobacter baumannii
  misc_feature (734)..(734): n is a, c, g or t
atgcaaaaaaaatggttaatcctgacaattatcgtcctcatttatttaccagttacgattgatgcaacggtaatgcatgttgcaacaccatctttaagtgcaccattgaatttaactgccaatcagcttttatggattattgatatttattcactgattatggcgggtttgattttgccgatgggtgcacttggtgatcgtattggctttaaaaaattattatttattggaaccgcagtttttggtgtgggttcgttagctgcggctttttctccaactgcctatgctttaattgcttcacgtgctgttttaggcctaggggcagctatgcttattcctgccactttatccggtatccgtaatgcctttaccgaagaaaagcagagaaattttgcacttggtctttggtctacagtaggtggaggtggagcagcttttggtccattagtcggtggttttgtattagagcatttccactggggagctgtattcctcattaatatcccgatcattttagtcgttctagttatgatcgtgatgatcattcctaaacaacaagagaaaactgatcaaccaattaacttagggcaagctttagttttggttgtagcaattttaagcctcatctattcaattaaatcggctatgtataacttctcggtgctcacggttgtgatgtttgtggtgggtataagcacattaattcacttcattcggagccaaaaaagagctangacaccaatgattgatctggaattatttaaacatcctgtgatttctaccagcattgttatggcggttgtttccatgattgctttggttggctttgaattattactgtctcaggagttgcagtttgtacacgggttttctccattacaggcggcgatgtttattattccatttatgattgcaattagtttaggtggtccattagcaggtatttgtttaaataaatggggtttacgtagagtatcgagcctaggtattttagtgagcgcgctcagtttgtgggggcttgctcagcttaatttttcaaccgaccactttttagcatggacgtgtatggtctttttaggctttagcattgagattgccttacttgcctcaactgctgccattatgtcatctgtgccccctcaaaaggcgagtgcagcaggtgctattgagggaatggcctatgagcttggagcaggattaggtgtcgctatttttggtttaatgttgtcttggttttatagccgctcaattattttgccagccgagcttccgtcagacttaattgaaaaagcgagtatctcgattggagaaaccatgcaattagcctctaatcttgaaaatcctttaggagggcaattagttgtagtggcgcagcaagcttttagctatgcacatagttgggtgcttaccctctcagcgatctgtttcttccttttaactgtattcgtctggtttagttttccgaagaaagtaaattaa

SEQ ID NO: 6060 - protein, 492 aa, Acinetobacter baumannii
  misc_feature (245)..(245): Xaa can be any naturally occurring amino acid
MQKKWLILTIIVLIYLPVTIDATVMHVATPSLSAPLNLTANQLLWIIDIYSLIMAGLILPMGALGDRIGFKKLLFIGTAVFGVGSLAAAFSPTAYALIASRAVLGLGAAMLIPATLSGIRNAFTEEKQRNFALGLWSTVGGGGAAFGPLVGGFVLEHFHWGAVFLINIPIILVVLVMIVMIIPKQQEKTDQPINLGQALVLVVAILSLIYSIKSAMYNFSVLTVVMFVVGISTLIHFIRSQKRAXTPMIDLELFKHPVISTSIVMAVVSMIALVGFELLLSQELQFVHGFSPLQAAMFIIPFMIAISLGGPLAGICLNKWGLRRVSSLGILVSALSLWGLAQLNFSTDHFLAWTCMVFLGFSIEIALLASTAAIMSSVPPQKASAAGAIEGMAYELGAGLGVAIFGLMLSWFYSRSIILPAELPSDLIEKASISIGETMQLASNLENPLGGQLVVVAQQAFSYAHSWVLTLSAICFFLLTVFVWFSFPKKVN

SEQ ID NO: 6061 - DNA, 2091 bp, Acinetobacter baumannii
  misc_feature (1102)..(1102): n is a, c, g or t
atgtatcaagtacttgctagaaaataccgtccacgtaatttcaatgagttagtgggacaaaaccatgtttctcgtgcattaagtagtgcattggaacgcggtcgtcttcaccatgcttatttatttacaggaacgcgtggtgtaggtaaaactacaattgcacgtattttagccaagtgtttgaactgtgaaacaggtgtgacttctacgccatgtgaagtttgtaccacttgtaaggcggtaaatgaaggccgctttattgacctaatcgaaatcgatgctgcctcaagaacaaaagtagaagatacgcgtgaacttttagacaatgtcccttatgcaccaacgcaaggtcgttttaaagtttacctgattgacgaagtacatatgctctctacgcattcttttaatgcgttattaaaaacactagaagaaccaccagaacacgttaagtttttgtttgcaacgacagacccacaaaagttaccgattacggtcatttcacgttgtttgcaatttactctaagacctttagctgtagatgaaattacaaagcatcttggcgctattcttgaaaaagaacagattgctgctgacccagatgcaatctggcaaattgctgaatctgcacaaggctctttacgtgatgcattatctttaactgaccaagcgattgcttatgggcagggtgctgtacatcatcaagatgttaaagaaatgcttggcttgattgaccgtacgatcatatatgatttgattatagcggttcatcaaaaccaacgtgaaaaagtgagccagttattactccaatttagatatcaagccttagatgtctcgttagtactggatcagctcatttcaacattgcatgagttggctttattacaatatttaccagagctcggcttaaagtacagtgaagaaattaataccaaaattcttcagctttctaaactgatttctgctcaagatttgcagctttactaccaaatcgcatgtaaaggccggtcagacttgcagcttgccgtaacgcaagagcaaggttttgaaatgtgcgttttacgattattggcattccgtcctttagcaccaaatgaaattttantttcagagcctattcaacaaaatgggcaagcagaagtaggtctaaattcacaagctcaaacagcccaagtgattgctcctgtaagtgctgttcagcctgttgaagttattagtcaacccgctatggttgaacctgaacctgaacctgaacctgaacctgaacctgaacctgaacctgaacctgaacctgaacctgaacctgaacctgaacctaatcaggacttaatggtatttgacccaaatcatcatgagttgattggacttgagtcagcagttgttcaagagactgttagtgttcttgaggaagatttcattccggtaccagaacaaaagttagtacaagttcaggctgaaacccaagtcaaacaaatcgaacctgaaccagcttctactgctgagcctataggtttatttgaagcatcgagtgctgaattttcacttgctcaagatacgtcagcttatgacttggtttctgaacctgttattgaacaacagccattggcgcaagctgaaattgttgaaacagttgcggtggtaaaagagcctaacgcaacagataactaccagctgatgccacaagatattttaaagttgccatcacaaactttgaaaggtgagtggacacttgaaaagtgggagttttggtttagaaatagccagctttctccagccgttcaagaacttgctcaacatggtgtgatgactggggaaattggtggcaacacggttttccatattcctcaagaatatgaaaatatgttgactcagctacaacaagccctaattgaagctttaaagcagcagtggccaaatacacaatttacggtcgagtatggtgcagtcaatactgctacaccgtatgttatgcaaagcgttcgtaaagaaaaagctttccatcgggctacagaactattacagcaacaacccgttattaaaagcctcatagagacttttgatggtgagctgcaaaatattcaattaaagccttaa

SEQ ID NO: 6062 - protein, 696 aa, Acinetobacter baumannii
  misc_feature (368)..(368): Xaa can be any naturally occurring amino acid
MYQVLARKYRPRNFNELVGQNHVSRALSSALERGRLHHAYLFTGTRGVGKTTIARILAKCLNCETGVTSTPCEVCTTCKAVNEGRFIDLIEIDAASRTKVEDTRELLDNVPYAPTQGRFKVYLIDEVHMLSTHSFNALLKTLEEPPEHVKFLFATTDPQKLPITVISRCLQFTLRPLAVDEITKHLGAILEKEQIAADPDAIWQIAESAQGSLRDALSLTDQAIAYGQGAVHHQDVKEMLGLIDRTIIYDLIIAVHQNQREKVSQLLLQFRYQALDVSLVLDQLISTLHELALLQYLPELGLKYSEEINTKILQLSKLISAQDLQLYYQIACKGRSDLQLAVTQEQGFEMCVLRLLAFRPLAPNEILXSEPIQQNGQAEVGLNSQAQTAQVIAPVSAVQPVEVISQPAMVEPEPEPEPEPEPEPEPEPEPEPEPEPEPNQDLMVFDPNHHELIGLESAVVQETVSVLEEDFIPVPEQKLVQVQAETQVKQIEPEPASTAEPIGLFEASSAEFSLAQDTSAYDLVSEPVIEQQPLAQAEIVETVAVVKEPNATDNYQLMPQDILKLPSQTLKGEWTLEKWEFWFRNSQLSPAVQELAQHGVMTGEIGGNTVFHIPQEYENMLTQLQQALIEALKQQWPNTQFTVEYGAVNTATPYVMQSVRKEKAFHRATELLQQQPVIKSLIETFDGELQNIQLKP

SEQ ID NO: 6063 - DNA, 2091 bp, Acinetobacter baumannii
  misc_feature (596)..(596): n is a, c, g or t
atgtatcaagtacttgctagaaaataccgtccacgtaatttcaatgagttagtgggacaaaaccatgtttctcgtgcattaagtagtgcattggaacgcggtcgtcttcaccatgcttatttatttacaggaacgcgtggtgtaggtaaaactacaattgcacgtattttagccaagtgtttgaactgtgaaacaggtgtgacttctacgccatgtgaagtttgtaccacttgtaaggcggtaaatgaaggccgctttattgacctaatcgaaatcgatgctgcctcaagaacaaaagtagaagatacgcgtgaacttttagacaatgtcccttatgcaccaacgcaaggtcgttttaaagtttacctgattgacgaagtacatatgctctctacgcattcttttaatgcgttattaaaaacactagaagaaccaccagaacacgttaagtttttgtttgcaacgacagacccacaaaagttaccgattacggtcatttcacgttgtttgcaatttactctaagacctttagctgtagatgaaattacaaagcatcttggcgctattcttgaaaaagaacagattgctgctgaccnagatgcaatctggcaaattgctgaatctgcacaaggctctttacgtgatgcattatctttaactgaccaagcgattgcttatgggcagggtgctgtacatcatcaagatgttaaagaaatgcttggcttgattgaccgtacgatcatatatgatttgattatagcggttcatcaaaaccaacgtgaaaaagtgagccagttattactccaatttagatatcaagccttagatgtctcgttagtactggatcagctcatttcaacattgcatgagttggctttattacaatatttaccagagctcggcttaaagtacagtgaagaaattaataccaaaattcttcagctttctaaactgatttctgctcaagatttgcagctttactaccaaatcgcatgtaaaggccggtcagacttgcagcttgccgtaacgcaagagcaaggttttgaaatgtgcgttttacgattattggcattccgtcctttagcaccaaatgaaattttaatttcagagcctattcaacaaaatgggcaagcagaagtaggtctaaattcacaagctcaaacagcccaagtgattgctcctgtaagtgctgttcagcctgttgaagttattagtcaacccgctatggttgaacctgaacctgaacctgaacctgaacctgaacctgaacctgaacctgaacctgaacctgaacctgaacctgaacctgaacctaatcaggacttaatggtatttgacccaaatcatcatgagttgattggacttgagtcagcagttgttcaagagactgttagtgttcttgaggaagatttcattccggtaccagaacaaaagttagtacaagttcaggctgaaacccaagtcaaacaaatcgaacctgaaccagcttctactgctgagcctataggtttatttgaagcatcgagtgctgaattttcacttgctcaagatacgtcagcttatgacttggtttctgaacctgttattgaacaacagccattggcgcaagctgaaattgttgaaacagttgcggtggtaaaagagcctaacgcaacagataactaccagctgatgccacaagatattttaaagttgccatcacaaactttgaaaggtgagtggacacttgaaaagtgggagttttggtttagaaatagccagctttctccagccgttcaagaacttgctcaacatggtgtgatgactggggaaattggtggcaacacggttttccatattcctcaagaatatgaaaatatgttgactcagctacaacaagccctaattgaagctttaaagcagcagtggccaaatacacaatttacggtcgagtatggtgcagtcaatactgctacaccgtatgttatgcaaagcgttcgtaaagaaaaagctttccatcgggctacagaactattacagcaacaacccgttattaaaagcctcatagagacttttgatggtgagctgcaaaatattcaattaaagccttaa

SEQ ID NO: 6064 - protein, 696 aa, Acinetobacter baumannii
  misc_feature (199)..(199): Xaa can be any naturally occurring amino acid
MYQVLARKYRPRNFNELVGQNHVSRALSSALERGRLHHAYLFTGTRGVGKTTIARILAKCLNCETGVTSTPCEVCTTCKAVNEGRFIDLIEIDAASRTKVEDTRELLDNVPYAPTQGRFKVYLIDEVHMLSTHSFNALLKTLEEPPEHVKFLFATTDPQKLPITVISRCLQFTLRPLAVDEITKHLGAILEKEQIAADXDAIWQIAESAQGSLRDALSLTDQAIAYGQGAVHHQDVKEMLGLIDRTIIYDLIIAVHQNQREKVSQLLLQFRYQALDVSLVLDQLISTLHELALLQYLPELGLKYSEEINTKILQLSKLISAQDLQLYYQIACKGRSDLQLAVTQEQGFEMCVLRLLAFRPLAPNEILISEPIQQNGQAEVGLNSQAQTAQVIAPVSAVQPVEVISQPAMVEPEPEPEPEPEPEPEPEPEPEPEPEPEPNQDLMVFDPNHHELIGLESAVVQETVSVLEEDFIPVPEQKLVQVQAETQVKQIEPEPASTAEPIGLFEASSAEFSLAQDTSAYDLVSEPVIEQQPLAQAEIVETVAVVKEPNATDNYQLMPQDILKLPSQTLKGEWTLEKWEFWFRNSQLSPAVQELAQHGVMTGEIGGNTVFHIPQEYENMLTQLQQALIEALKQQWPNTQFTVEYGAVNTATPYVMQSVRKEKAFHRATELLQQQPVIKSLIETFDGELQNIQLKP

SEQ ID NO: 6065 - DNA, 768 bp, Acinetobacter baumannii
  misc_feature (572)..(572): n is a, c, g or t
atgttgaatcaacatgagataaatttaaaacagtatcaaaataaatctttaagttatttgaatagcaccgctcactctgaaggggtcgagtttgataaattcattaaagaaattgatgaatatccaaatgccgttgttttagatttaggttgcggtggtggccatgtagcttataacgttgctcgccatgcagatctggtttttgcttatgatttatctcatgaaatgctcgatacagtttcaaaagctgccaatgctcgaaaaataaaaaatatttttgtacaacaaggcattgctgaagatatgccttttactgatgaacagtttgatgtaattattagtcgatattctgcccatcattggcagcatgtcccaacagcaatgaaagaaataaatcgtgtattaaagccaaatggcactgttatttttgttgatattattagctcaagtttccctattttagatacatttttacagactatagaagtgattcgagaccctagtcatgtacgaaattacagtattaaagactgggttcactttattgaagatgctgggtttgaattaacaantttagagaaacaaaccctcaaactagattttgatagttgggtacagcgcatgaagacacctgaagatcaaataaaaacgcttaaatatctccaagaaaatgcagcagatgttgttaaaaagtattttaatattcaaaaagatggaagttttgaaagtaaggtcgggtactttgtatttaaaaaactatccttctaa

SEQ ID NO: 6066 - protein, 255 aa, Acinetobacter baumannii
  misc_feature (191)..(191): Xaa can be any naturally occurring amino acid
MLNQHEINLKQYQNKSLSYLNSTAHSEGVEFDKFIKEIDEYPNAVVLDLGCGGGHVAYNVARHADLVFAYDLSHEMLDTVSKAANARKIKNIFVQQGIAEDMPFTDEQFDVIISRYSAHHWQHVPTAMKEINRVLKPNGTVIFVDIISSSFPILDTFLQTIEVIRDPSHVRNYSIKDWVHFIEDAGFELTXLEKQTLKLDFDSWVQRMKTPEDQIKTLKYLQENAADVVKKYFNIQKDGSFESKVGYFVFKKLSF

SEQ ID NO: 6067 - DNA, 912 bp, Acinetobacter baumannii
  misc_feature (568)..(568): n is a, c, g or t
atgattgttcgtgataaaagcaatgtatttaaactcttatttgcttggaaaggaacaattttgccgaaggttttgcctgcactgagttttgttgtacttatttcagcctgtgtggtctggctctcttattatcattggattcaaatacctaccgtacccgcgatcggatttaccatctttggcgtgattctttcgatttgtacaggctttagaaataacgcatgttatgaccgttggtgggaaggccgcaagctctggggtgctttaattgccaatgccagacatattgttagagatagccatgttttatctaatgaaaaacgcgaacatttaattcatcaggtcttaatttttagtaacttattgcgtgatcgtttacgtcaacaaacagttgaacccacaaaatttcttgaacatgcctatttaaataactcttcacttaattatttaaatgagcatattaatgcacctcaatttgtactcgaaaatattcaaaaggatttagtcaaagctctaaaagacggtgaaattagtgacatcatctatagcacgctaaatcgacatattnttgagctaggtaatattcaagcgggttgtgaccgaattgctgggacacctttaccctactcatattcagtacttttgcaccgtgctgtttattgtttctgcttcatcttaccttttagccttgaagctgctttaggcatttggacaccgcttattgtcggcttaatcgcttatatgtttttaggactagatgccttaagtgctcaaattgaagaaccttttggcttgcaagaaaatgatttaccgctcgattctattgtgcgtttaattgaacgagagtctctaagctctttagggcagccattaccgcctattattgaagcccaaaacaacaatttactttaa

SEQ ID NO: 6068 - protein, 303 aa, Acinetobacter baumannii
  misc_feature (190)..(190): Xaa can be any naturally occurring amino acid
MIVRDKSNVFKLLFAWKGTILPKVLPALSFVVLISACVVWLSYYHWIQIPTVPAIGFTIFGVILSICTGFRNNACYDRWWEGRKLWGALIANARHIVRDSHVLSNEKREHLIHQVLIFSNLLRDRLRQQTVEPTKFLEHAYLNNSSLNYLNEHINAPQFVLENIQKDLVKALKDGEISDIIYSTLNRHIXELGNIQAGCDRIAGTPLPYSYSVLLHRAVYCFCFILPFSLEAALGIWTPLIVGLIAYMFLGLDALSAQIEEPFGLQENDLPLDSIVRLIERESLSSLGQPLPPIIEAQNNNLL

SEQ ID NO: 6069 - DNA, 2184 bp, Acinetobacter baumannii
  misc_feature (272)..(272): n is a, c, g or t
atggaaagacgttcgttaaatcttcacttcatgacatgctctaaaacagcattggcttcatctattgcactcataacatctgtcgtctatgcaaatgaagcggaggtttcgcagctcccaaccattactgtgaacgctacacaaaatagtgatgcgctatacacatcaaaaaaagtgagtttatctggttttcaaactggtgatgtaaagaaagtacctgcatctattaccaccattacatctgaacgtatagcagatcaacacgcaaaaanactgaccgatgtgattaaaaatgattcatccttaggcgatggctatgctgcaattggctactatccaaactttgtagcacgtggtttcgcactcgatttaggctcaagctatctcattaatggccataccatacgtggcgaacaaaatgtagctttagaaaataaagaacaagttgaaatcttaaaaggcatttctgcaattcaaagtggaatgtcgacaccaggtggtgtggttaactatgtaaccaaaagaccagccgatgttaaaaacattactgtagatgcaaattcagaaggcggctatacactggcaacagatgttggcggctttgttaatgatagttttggttatcgaatcaatttagcccatgaaagcatccatccaaatgttcatcatgcaaatggtaagcgtgagtttggttcagtagctttagactggaaaattaatgagcgttctaaattattgttcgatattgaagcccagcatcaaagtcaacgttcagtacccggttatcaactgcttgatgggcaagaagtaccaacaaatgtagatcaagaccgtttattgggttaccagtcttggagtaagcctgttgtaaataacagtctaaatgcgagtttgaaatatcaatatgcatttaacgatcaatggaatggtagcttaagtgcgtctcaaagccgtgttgtgattgatgattatattgtatttccttatggaagttattactcatcaggtaatgaacttgcagtattcgacaaagatggcaactatgacatttatgattatcgcagtccagatgatgcacgtataaccaatcagtttgctgctgggttaaatggtcaattcaatactggcaatatacagcatcaaatcgctttcgaattacaacatacttataaaactctaaaacaccatacaccacttaatggatttataggaacaggcaatatctatgaaaatacggtcgactacaatccgtcattggaaagtccaggcgatcgttacaaagctctacagagtgatcagactgcatttactgtatctgaccgagttcaatttaatgatcactggtcaaccttactcggtgggaaactgattcatcttgatgagcaagcttataattcagatgggcagcaaagccgtgatacggatttaaacaagttcttgccacaattagcgctcatgtatagcccaactgctacgactaatctatatgcttcatatgctaaaggtttatcagacggtggcgaagctccgtggtatacaaataatattaaaaataatataggcccttcagtactatcacctagaagctctgaacaatatgaaattggtattaagcaacaaattcggaacttcttagtaacagcagctatttttgatttaaaacaagacaatcaatatagcaaagtgaatgcagaaggaactttcgattttgtttcacaaggtgaacaacacaatcaaggtattgaattaggtttaacaggtgctttaactgataaactcgatataagttcaggtattacctataccaaatctcgtcttgttgatattgatactgacagctacaaaggtcatcaaactcaaaatgtgccgaaagtacgtgccacagcccagttatcttataaagtaccgtcagttgaaggtttaagattattgagtggtatgcaatacagtagcagtaaatatgcaaataaagagggagctgcaaaagtaggcggatatagtgtctttaatattggtgctgcctataaaacaaattttgctgggcatgacacaacttttagatttaatattgataacttatttaataagaaatattggcgtgatgtaggcgcatttatgggagatgactatctgttcttaggtaatcctcgcacggctcaattttctacaacttttagcttttaa

SEQ ID NO: 6070 - protein, 727 aa, Acinetobacter baumannii
  misc_feature (91)..(91): Xaa can be any naturally occurring amino acid
MERRSLNLHFMTCSKTALASSIALITSVVYANEAEVSQLPTITVNATQNSDALYTSKKVSLSGFQTGDVKKVPASITTITSERIADQHAKXLTDVIKNDSSLGDGYAAIGYYPNFVARGFALDLGSSYLINGHTIRGEQNVALENKEQVEILKGISAIQSGMSTPGGVVNYVTKRPADVKNITVDANSEGGYTLATDVGGFVNDSFGYRINLAHESIHPNVHHANGKREFGSVALDWKINERSKLLFDIEAQHQSQRSVPGYQLLDGQEVPTNVDQDRLLGYQSWSKPVVNNSLNASLKYQYAFNDQWNGSLSASQSRVVIDDYIVFPYGSYYSSGNELAVFDKDGNYDIYDYRSPDDARITNQFAAGLNGQFNTGNIQHQIAFELQHTYKTLKHHTPLNGFIGTGNIYENTVDYNPSLESPGDRYKALQSDQTAFTVSDRVQFNDHWSTLLGGKLIHLDEQAYNSDGQQSRDTDLNKFLPQLALMYSPTATTNLYASYAKGLSDGGEAPWYTNNIKNNIGPSVLSPRSSEQYEIGIKQQIRNFLVTAAIFDLKQDNQYSKVNAEGTFDFVSQGEQHNQGIELGLTGALTDKLDISSGITYTKSRLVDIDTDSYKGHQTQNVPKVRATAQLSYKVPSVEGLRLLSGMQYSSSKYANKEGAAKVGGYSVFNIGAAYKTNFAGHDTTFRFNIDNLFNKKYWRDVGAFMGDDYLFLGNPRTAQFSTTFSF

SEQ ID NO: 6071 - DNA, 1671 bp, Acinetobacter baumannii
  misc_feature (1096)..(1096): n is a, c, g or t
atgagtaaatctatcgagaagtttcctaaagagttagtctcgcctatagcacagcttcattccttagttgagaagaattcaaaattacatatcaaagaattatttgcagccgagcaagaccgctttcaaaactattcggtaaagttcgatcaattggtttttgattacagtaaacaccgtataactaaaagtgttctagaacaattgtttgctttagcaaagacgaaacaattgactcactggattgagcgcttattttcccaagacaaagtcaactgtactgagcagcgtgcagctatgcattgggccttacgtttaccatcggaatattctaaatttcctgaactcacaaaacaggttcatactcaattacagcgtatgtatgctttggttgaaaaaatccatgctgggcaatatcgtggtgctacgggtgaggtgattcaggatgtcgttaatattggggtaggtggttctgatttagggcctcaaatggtgacccatgcactatgcgattttaaagtaaaaactgccaaaccacttaatgtacactttgtttcgactatggatggtagccagttatcagacttactccatcaactgcgtccggaaacaactttatttattatttcttcaaagtcatttggtaccattgataccttatcaaatgcacaaacagttcgtcagtggcttgagaaagctttagggaagcatgaccgcgttgtaaaaagtcacttcattggtgtatctacaaaagctgaaaaaatgactgagtggggaattgctcctgaaaatcagttgttgctttgggactgggtaggtggtcgttattctctttggtcttgtattggtttccccatagccctaacgattggtatagatggctttcaacagcttttagctggcgcacatgctgttgatgaacactttcaaaatacaagctttgagcaaaatataccggttctcatggcattactcggtatctggaataataattttttaaatattcaaacccatgcggtattaccttatgacggaagattaaagtattttgctgcctatttgcagcagcttgaaatggagtctaatggtaagtcgntacaacgtgatggccaaaaagttgaattagatacttgtccgattgtatggggggaggttggtccaaatgcccaacatgcattttatcagctacttcatcaaggaacacaggcagtaagctgtgatttcattgcaccgatccaacgttataatgcagatcactttacgtatgtagagaatgctgaggcattgtttgaacaacatcacctcgcattatcaaattgtttggcgcaatcacgtttattggcttttggtaatgaagctttggattcagctgaactaaagaatttaccaatttataaacaatatgaaggtaatcagccgagttcgacattacttttaaaagaactaaatccatatagtttagggatgttaattgctttatatgaacataaggtatttgttcagtcggtaatttggaatattaatccgtttgatcaatggggggttgaaaaaggtaagcagattgctgatcagttacttccaattttaaacggtgctcaaaatgatctttcaacacttgatgcttcaacacgtggtttgattaaaattttattaggaaaagtcgatggctaa

SEQ ID NO: 6072 - protein, 556 aa, Acinetobacter baumannii
  misc_feature (366)..(366): Xaa can be any naturally occurring amino acid
MSKSIEKFPKELVSPIAQLHSLVEKNSKLHIKELFAAEQDRFQNYSVKFDQLVFDYSKHRITKSVLEQLFALAKTKQLTHWIERLFSQDKVNCTEQRAAMHWALRLPSEYSKFPELTKQVHTQLQRMYALVEKIHAGQYRGATGEVIQDVVNIGVGGSDLGPQMVTHALCDFKVKTAKPLNVHFVSTMDGSQLSDLLHQLRPETTLFIISSKSFGTIDTLSNAQTVRQWLEKALGKHDRVVKSHFIGVSTKAEKMTEWGIAPENQLLLWDWVGGRYSLWSCIGFPIALTIGIDGFQQLLAGAHAVDEHFQNTSFEQNIPVLMALLGIWNNNFLNIQTHAVLPYDGRLKYFAAYLQQLEMESNGKSXQRDGQKVELDTCPIVWGEVGPNAQHAFYQLLHQGTQAVSCDFIAPIQRYNADHFTYVENAEALFEQHHLALSNCLAQSRLLAFGNEALDSAELKNLPIYKQYEGNQPSSTLLLKELNPYSLGMLIALYEHKVFVQSVIWNINPFDQWGVEKGKQIADQLLPILNGAQNDLSTLDASTRGLIKILLGKVDG

SEQ ID NO: 6073 - DNA, 1707 bp, Acinetobacter baumannii
  misc_feature (617)..(617): n is a, c, g or t
atgcaaacattttctcctcaagcagtgattgaacgcttacaaaacattgtagggcgttcgcatgttttgaccgatgatcaaagcacacgtcagtaccgccaaggtcgtcgttttggagaggggaaagtgcttgcagtggttgtaccagggaccttgctagagcaatggcaagtgttgcaggctgcaattgaggcagactgtattgtgattatgcaggcggccaatacgggattgaccggtggttcaacgccatatggcgatgactatgatcgtcctgttttggtgatgagcacgcgccgattaaagggcattcaggtcattcatgacggtaagcaagtgatttgtttacccggtgcgaccttagataatttagagcaaattttaaaaggctataatcgtgaaccacattcggtgattggttcatcttgtataggtgcatcggtactcggtggtgtctgtaataactctggtggtgccttggtacgccgtggtcccgcgtatactgaactggcgttatatgctcaagtaaatgctactggtcagttagaactggtaaatcatttaggcgtaaatttaggctcgactcctgaagaaattttgacgcgtttagagaagcngcaataccaagccgtagatattttagatgacaacgaaaagcaggcatcggaccatcgctatgctcatgatgtgatgcaagttgatgaagatacgcctgctcgttttaatgcagacccatcacgtttgtttgaagcctcgggttcagcaggtaaggtctgtgtgtttgctgtacgccttgatacctatgaaaaagtagagagcagtgttttttatattggtagtaatgatgccgatgatttaacggccattcgtcgctacttactgacctcactgccaagcttgccaattgcaggcgaatatattcaccgtgatgcttatttgattggtgaaaagtacggaaaagacacgtttttatttattgaaaagtttggtacagccaatgttccaaaagcctttgcgatgaaagataaagtcgatggctttttagaaaaatttaaaattaaaggcttaacagaccagattttacaggcgattaccttctttttaccgagtcatttgcctaagcgtatgaccgaatatcgagatcgttatgagcaccatttagtgttacgtgttgaaaataattcaaaagctcagaccgagcagtttttaaaagaatattttgcagtgcatcagtcaggcaactatttcgtatgtagcgaagaagaggggcgaaaggcgttcttacaccgttttgcgattgcaggggcggcaattcgttatcgtgatacgcaccgtagtgaagttgaagatattgtagcgcttgatattgcgctacgtcgtaatgaccgcgaatgggtagagcaactaccagccgagatggaaaagaaaatcatccataaactctattatgggcatttcttttgtcatgttttccatcaggactatattcttaaaaagggcaatgaccctttagaaatggaacatcaaatgtggaaattactcgatgcgcgccgtgctgaatatccggcagagcataatgtcgggcatctttatattgccaagcctgccttagccaacttttatcaaaaactcgacccaaccaatagctttaatgtgggtattggccatacctcaaaactgaaatattggggtaaggctaaatcttaa

SEQ ID NO: 6074 - protein, 568 aa, Acinetobacter baumannii
  misc_feature (206)..(206): Xaa can be any naturally occurring amino acid
MQTFSPQAVIERLQNIVGRSHVLTDDQSTRQYRQGRRFGEGKVLAVVVPGTLLEQWQVLQAAIEADCIVIMQAANTGLTGGSTPYGDDYDRPVLVMSTRRLKGIQVIHDGKQVICLPGATLDNLEQILKGYNREPHSVIGSSCIGASVLGGVCNNSGGALVRRGPAYTELALYAQVNATGQLELVNHLGVNLGSTPEEILTRLEKXQYQAVDILDDNEKQASDHRYAHDVMQVDEDTPARFNADPSRLFEASGSAGKVCVFAVRLDTYEKVESSVFYIGSNDADDLTAIRRYLLTSLPSLPIAGEYIHRDAYLIGEKYGKDTFLFIEKFGTANVPKAFAMKDKVDGFLEKFKIKGLTDQILQAITFFLPSHLPKRMTEYRDRYEHHLVLRVENNSKAQTEQFLKEYFAVHQSGNYFVCSEEEGRKAFLHRFAIAGAAIRYRDTHRSEVEDIVALDIALRRNDREWVEQLPAEMEKKIIHKLYYGHFFCHVFHQDYILKKGNDPLEMEHQMWKLLDARRAEYPAEHNVGHLYIAKPALANFYQKLDPTNSFNVGIGHTSKLKYWGKAKS

SEQ ID NO: 6075 - DNA, 1215 bp, Acinetobacter baumannii
  misc_feature (666)..(666): n is a, c, g or t
atgtttcaacatatccccccatacgcaggcgatccaattctctctttaatggaacagttcaatgctgatactcgttctgaaaaagtaaacttgagtattggtctttattataacgaagacagcattgttcctcagttagagaccattatcgaggcacaaaagcgtattgagcctaagaacggtaaaaccaaactttatttgccaatggaaggcttcaaaccttaccgtgaagcaattcaagcacttttatttggtgcaaacagcccagcagttaaagctggccgtgctgtaaccatccaaacgcttggtggttcaggtgcattgaaagttggtgctgacttcttaaaaacttatttcccaaattcagacgtttgggtaagccaaccaacttgggataaccacgttgcgattttcaatggcgctggcatcaagactcatttctacccatatttcgatgcagaaacgcgtggtgtagattttgacggtatgttgtctacacttaaaactttgcctgagcaaagcattgtgttgttacacccatgctgccataacccaacgggtgctgacttaaacccagcgcaatgggaccaagtgattgcagtattaaaagatcgtaaccttattccattcctagacatcgcttaccaaggttttggtgacggtatngaagaagatgcgtatgcaatccgtgccttagaccaagcgggtctaaacttcatcgtgagcaactcgttctctaaaatcttctctttatatggcgaacgcgttggcggcttaactttcgtatgtgacgatgcagaagctgctcagtgcacattcggtcagttaaaagcgactgtacgccgtatttactctagccctcctactacaggcgcttggttagttgatgaagtgttaaatgacgctgaacttaaccaacaatggcaaggcgaagtgaaagagatgcgtgagcgtattattaaaatgcgtagcatcttgaaagacgaacttactaaagcattaccagaccgcgactttagctaccttgtaaaccaaaaaggtatgttcagctacacaggtttaactgctgaacaggttgatatcttgcgtgaagaatatgcaatctacttagtacgtagtggccgtatttgtgtagcaggtttaaacatgaacaatgtttacactgttgctaaagcaatggctgaagtgcttgctaaatcagtagaagcagcataa

SEQ ID NO: 6076 - protein, 404 aa, Acinetobacter baumannii
  misc_feature (222)..(222): Xaa can be any naturally occurring amino acid
MFQHIPPYAGDPILSLMEQFNADTRSEKVNLSIGLYYNEDSIVPQLETIIEAQKRIEPKNGKTKLYLPMEGFKPYREAIQALLFGANSPAVKAGRAVTIQTLGGSGALKVGADFLKTYFPNSDVWVSQPTWDNHVAIFNGAGIKTHFYPYFDAETRGVDFDGMLSTLKTLPEQSIVLLHPCCHNPTGADLNPAQWDQVIAVLKDRNLIPFLDIAYQGFGDGXEEDAYAIRALDQAGLNFIVSNSFSKIFSLYGERVGGLTFVCDDAEAAQCTFGQLKATVRRIYSSPPTTGAWLVDEVLNDAELNQQWQGEVKEMRERIIKMRSILKDELTKALPDRDFSYLVNQKGMFSYTGLTAEQVDILREEYAIYLVRSGRICVAGLNMNNVYTVAKAMAEVLAKSVEAA

SEQ ID NO: 6077 - DNA, 702 bp, Acinetobacter baumannii
  misc_feature (227)..(227): n is a, c, g or t
atgaacaacaatattataatttttggttatggaacaggtatttccaaagccgtagcacataagtttggtaaagaaggctataaaatcgggttagtggcacgtaatgctgaaaaactcgaaaaagccattttagaacttaaaacacaaggtattgaagcttacgcttttgcatgtgatttagcggttcttgaagatataccaaatcttattaatcgtattaaagaccnattaggagagattaaaaatattcattggaatgctttccatgatattgaaggcaatatcttaaaaacccctccactagagctcaccaaaagctttcatattcgtgtttcgagctatattgcgacggtacaggcttgcttaggcgatttagagaagaatcacggtagcattttatcgacaaacggaatttttgctttcgatgcagtgggtatcgacttggtggctaaagagtactcatccttagcaactaccgctgccgctcaatacaaagccaccaacttgcttgctcatagtctagcggactcaaatgtttacgtgagccaagtgattgtgaatggttttgttgatgggacatctggagcacaagataagacttacacggtacatccagaaaccattgcggagcagttctggtacttacaccagcataagcaagaaactgtttccttttgtggtgaagccattcaagctgcttaa

SEQ ID NO: 6078 - protein, 233 aa, Acinetobacter baumannii
  misc_feature (76)..(76): Xaa can be any naturally occurring amino acid
MNNNIIIFGYGTGISKAVAHKFGKEGYKIGLVARNAEKLEKAILELKTQGIEAYAFACDLAVLEDIPNLINRIKDXLGEIKNIHWNAFHDIEGNILKTPPLELTKSFHIRVSSYIATVQACLGDLEKNHGSILSTNGIFAFDAVGIDLVAKEYSSLATTAAAQYKATNLLAHSLADSNVYVSQVIVNGFVDGTSGAQDKTYTVHPETIAEQFWYLHQHKQETVSFCGEAIQAA

SEQ ID NO: 6079 - DNA, 531 bp, Acinetobacter baumannii
  misc_feature (31)..(31): n is a, c, g or t
atggctcatgctcatcacgcagctcatgcanatgttcatcatatcgaagagagaaaagaagaccgttctcaaggcgatttaaaaacaaaagtgatgttaagacaagcagcttcgacgactgaaaaatctaaacgatctagaactaaaaatcataaaactgaagaccaaaatattgatctacataagttctcaagtaagcttgaaagtatgtctgcaaagcacagtaaagaaaaatgtgccaagaatattcgcattgccttacaagctgcgggtgcagatgtatcaaagcatcctgtagctgcatctgactgggggcacaccttagaaaagaatggttataagaaaatcaagccggcatttaatcgtcctcaagaaggggatatttatattatcgaacgtaccagtggtcatacttacgggcatattgcgggctatacgggtaatggctggttctcagattttcgtcaaaaaacctatgcggtctataaagaaaaagatgtgaaatatagttactatcgcctcgactcttaa

SEQ ID NO: 6080 - protein, 176 aa, Acinetobacter baumannii
  misc_feature (11)..(11): Xaa can be any naturally occurring amino acid
MAHAHHAAHAXVHHIEERKEDRSQGDLKTKVMLRQAASTTEKSKRSRTKNHKTEDQNIDLHKFSSKLESMSAKHSKEKCAKNIRIALQAAGADVSKHPVAASDWGHTLEKNGYKKIKPAFNRPQEGDIYIIERTSGHTYGHIAGYTGNGWFSDFRQKTYAVYKEKDVKYSYYRLDS

SEQ ID NO: 6081 - DNA, 1668 bp, Acinetobacter baumannii
  misc_feature (956)..(956): n is a, c, g or t
atgctcacacatttaactttaatcaattttgcattagctgatcatttagctattgatatagaacaaggatttaatgttctaacaggtgagacaggtgcaggaaaatcattattactggatgcactatctgcctgcttaggggaacgtacagatacaaattatgtccgctatggttcggacaaagcggatgtaaccgcagtttttacttatcaggacaatagccctgaagcaaaatggttaaaagaacatgaactagatgatgattcaggggaaattcatttacgtcgggttatttttgcaactggccgtagcaaagcatgggtaaatggtcgtccaagtagtctctctgagcttaaagaattaggccgcttattggttcagttgtatagccagcacagccaacaacaactacttgaaccgccttatccaaagcattggctagaccgttatagtaatttttacgccgaagcaaatgatgttcgtgaagcatatagtacatggcagcgtaatatccgccagcatcaggctgcgctcgacgctcaggcaacccgtcttcaacgtattgcgaccttagagttacaaattgaagagcttgaggaagtcattcaaaccgattacaaagaaatcgagcaagagttcgatcgcctcagtcatcatgaacatatcatgcaagactgtagctatagtttaaatgcgcttgatgaagctgaacaaaacattactcaagaaatgtcgtcgatcattcgccgtctagagtctcatgcggggcgtagtgggcagctttccgaaatttataattcgttattaaatgcgcaaagtgaaattgatgatgccacatcaaatttacgtcaatttattgaccgtcagagtttcgatcctgaacggatggaagaactgaactccaagctagaggttttccatcgacttgctcgtaaataccgtactcaaccagaaanacttaaagaagagtacgaaacttggcaaagtgagcttgagcaattacatcagttagaagaccctgaaactctggctgaacaagtagaaaagtcacatcaagaatttttagaaaaagcccagcatttagacaatattcgtcgtgaagctgctgctccacttgcaaaacaattaactgaacaggttaaacctttagcgctgcctgaggcacactttgagtttaagtttgaaccattagagcaaccaaatgcagaaggtttaagttttattcaacttttatttactgccaataaaggcatacctcctcaaccattggcacgtgtagcatctggtggtgagctttctcgtattgcactcgttatgcaagtcatgaatgctgaaaagaccgaagcagaagttttggtatttgacgagattgatgtcggaattagtggtggtacagctgaagtggttggacgtttattggccgacttggctcagcatgtccaacttttatgtattacccaccaagcacaggtggctgcacaatccgatcaacatttgttagtcaaaaaacaacaaactgatccggcaagtagtactattgtacaacttgatgaaaatcaaattatttccgagttagcgcgcatgtcaggaggtgttgaaattaatgaaacaaccttgcagcatgctaaacaattacgtcaacttaaatttcaggcttcttcaacttaa

SEQ ID NO: 6082 - protein, 555 aa, Acinetobacter baumannii
  misc_feature (319)..(319): Xaa can be any naturally occurring amino acid
MLTHLTLINFALADHLAIDIEQGFNVLTGETGAGKSLLLDALSACLGERTDTNYVRYGSDKADVTAVFTYQDNSPEAKWLKEHELDDDSGEIHLRRVIFATGRSKAWVNGRPSSLSELKELGRLLVQLYSQHSQQQLLEPPYPKHWLDRYSNFYAEANDVREAYSTWQRNIRQHQAALDAQATRLQRIATLELQIEELEEVIQTDYKEIEQEFDRLSHHEHIMQDCSYSLNALDEAEQNITQEMSSIIRRLESHAGRSGQLSEIYNSLLNAQSEIDDATSNLRQFIDRQSFDPERMEELNSKLEVFHRLARKYRTQPEXLKEEYETWQSELEQLHQLEDPETLAEQVEKSHQEFLEKAQHLDNIRREAAAPLAKQLTEQVKPLALPEAHFEFKFEPLEQPNAEGLSFIQLLFTANKGIPPQPLARVASGGELSRIALVMQVMNAEKTEAEVLVFDEIDVGISGGTAEVVGRLLADLAQHVQLLCITHQAQVAAQSDQHLLVKKQQTDPASSTIVQLDENQIISELARMSGGVEINETTLQHAKQLRQLKFQASST

SEQ ID NO: 6083 - DNA, 1392 bp, Acinetobacter baumannii
  misc_feature (346)..(346): n is a, c, g or t
atgaatgccacgccaacccatcaagccttgcaacccgaatatcgcctattggttcttttggtttccattggcttttttatgcaggcattagatacaacaattgtaaatactgccattcctgcaatggcacaccatttaaatgaagatccattacgtatgcatagcgtagtggtggcttatgttttatctgtagctgcctgcattcctttaagtggatggttagccgaccgttttggtgttagaaatacgtttttatcagcaatcattattttcacacttgcttccttaggctgtggcctttctcaaagccttaatgaacttttatttttccgtgtcattcagggtnttgggggtgcgttattactccctgttggtcgtttatcacttttaaaaattattccccgaactcaatttttggcagccatgagcctcatgagtctagcaggtttactaggccctttagctggtccaacactcggtggttggctcgttgaagttgcaacctggcattggatctttcttattaatattccaatgggagtattgggcatattaatgacattaaaggtcatgccaaatgtaaaagagcctaccgttaaaacttttgatcttattggatttgtgctcttagtcgtcgcaatgattggctggtctttgggtattgaacatcttgcctcacctgagtattccaaatggtttagtatttctttattagtggtcggggtagtcgcaaccctttggtatgcctaccattcacatacccatcaaaatgcattgttccgtagccgactctttagaaacaagatttacgcgattggtattttaggtaatttctttgcccgctttggtggtaatgccttaccttttgttttaccgctcatgttacaggtcgcttttggttttgagccattcattgcgggattaatgatgattccgttagtgttagggtcacttttctccaagccgattgttagaccgattattcagaaaatgggttatcgccgctttctgttaattaacacaactttagttggtctatgtattgcgtcttttgccattatgactgtcgacacccccacttggtttagagccttacactttttcttatttggtacattaaactcattacaatttgtgggaatgaatacacttaccttaaaagatttgcctcaacaagatgcaagtagcggtaatagtttcttatcaatgattatgatgctttcaatgagtattggtgttgcactggcaggtacactcattaatgtatttaccgattactatggtacagcacatgtgacaactgccttccatgttaccctcatttgtttaggctgtattaatatcattaccgcactgatcttttggcaaatacccaaaaatacgcctgtgtaa

SEQ ID NO: 6084 - protein, 463 aa, Acinetobacter baumannii
  misc_feature (116)..(116): Xaa can be any naturally occurring amino acid
MNATPTHQALQPEYRLLVLLVSIGFFMQALDTTIVNTAIPAMAHHLNEDPLRMHSVVVAYVLSVAACIPLSGWLADRFGVRNTFLSAIIIFTLASLGCGLSQSLNELLFFRVIQGXGGALLLPVGRLSLLKIIPRTQFLAAMSLMSLAGLLGPLAGPTLGGWLVEVATWHWIFLINIPMGVLGILMTLKVMPNVKEPTVKTFDLIGFVLLVVAMIGWSLGIEHLASPEYSKWFSISLLVVGVVATLWYAYHSHTHQNALFRSRLFRNKIYAIGILGNFFARFGGNALPFVLPLMLQVAFGFEPFIAGLMMIPLVLGSLFSKPIVRPIIQKMGYRRFLLINTTLVGLCIASFAIMTVDTPTWFRALHFFLFGTLNSLQFVGMNTLTLKDLPQQDASSGNSFLSMIMMLSMSIGVALAGTLINVFTDYYGTAHVTTAFHVTLICLGCINIITALIFWQIPKNTPV

SEQ ID NO: 6085 - DNA, 2220 bp, Acinetobacter baumannii
  misc_feature (262)..(262): n is a, c, g or t
atgaccagccttgcgcatcatgcgacagaaaaccgctctgtagccgaatttactgaacaggcttacttgaattatgccatgtacgtcattatggaccgtgcattgccgcatatcagtgatggcttaaagcccgtacagcgccgtattgtctatgccatgagcgagctaggcttaaaaagcagtggaaagccaaaaaaatcagcgcgtacagtgggtgatgtactgggtaaataccacccacatggtgactcggcatgttatnaagccatggtactcatggctcagccatttagttatcgttatccgctaattgaaggacaggggaactggggttcaccagatgatcctaaatcttttgctgcgatgcgttataccgaagccaaactctcggcttatagtgaattattgctgagcgaattaggtcagggcactagcgaatggcaagataactttgatggttctttaaaagaaccgatcactttacctgcacgtgtacctaatattcttcttaatggtacgacaggtattgctgtcgggatggcaactgatatcccgccacataatttgcgtgaagttgtaaaaggcacaattgctttaatccgtaatccgcaaacctcggacgaaaaattagctgaatatattccggctccggatttaccaaccaaagctgaaattattaccccgccagaagaattactcaaaatccagaccactggtcgtggtagttaccgtatgcgagcggtatataccattgagaaaaatgaaatcgtaattactgagctcccatatcaagtctctggttctaaggtaattacccaaattgctgaccaaatgcaggctaaaaagctgccattagtcgttgatgtgcgtgatgaatcggatcatgaaaacccgacacgactcgtgattgtactgcgctctaaccgtattgatgcggaagcagtaatgagtcacttatttgcgaccaccgatttagaatcaagctatcgtgtcaatttaaacatgattggcgaagatggccgtcctcaggtgaaatcaattcgtcgtattttgcttgaatggatcgagatccgtaaaaaaacggtaactcgtcgtttgcagtaccatttaaaccgtattgaaaagcgcctccatattttggcaggtcttttaattgcttatctcgatattgatacagtcattcgtattattcgtgaagaagaccagcctaagccagtcttgatggaacacttcaatattgatgagatacaggccgaagcgattttagagcttaaattacgtcatttggccaagcttgaagagatggaaattcgtcatgaacaagatgagctttccgcgaaagctgccattattcgtgaacaactcgaaaatcctgaatctttaaaaaacctgattatcagtgaattaaaagaagatgcgaaaaagttcggtgatgagcgccgttctccaattgttgcacgtgctgaagcggttcaaattaaagaacaggatttaatgccagctgaaacggtaacagtcgtgttgtctgaagcaggctgggttcgtgcggcaaaaggtgcggatgtggatgccgaaaatctgaactaccgtgctggggaccaatatttaagtcatgctgtcgggaaaaccaatcagcgagtttacttccttgatgaaacagggcgcagctatgccttgccaattagtaacttaccttcagcgagaggcttgggggatccattaagttctaaattatcaccagcaagtggcgtatcgtttattcaggtttatttagatgatgatgagtctgaattgattgctgcaagttcggcaggttatggttttaaaacgcaaaccaagcaattagataccaatgcgaaagccggtaagacattcttaacggttccggataaggcaaaggctttaccactcatttctgcccaaaacatgacgcatttggctgtactgagctcagcagggcgtttgttaattttagatttggcagagctaccaaatttaaataaaggtaaaggtaataagttgatacaacttgaaggcaaagagcaaattttatccatgacaaccctgaacttagatgaaataattcaggtggttgcaggtcaacaacatctcaaattaaaaggtgatgatctacaaaaatacatgggtaaacgtgcttcgaaaggtcagctcttaccacgtggatatcaaaaagcaaataaactgttgattcagagataa

SEQ ID NO: 6086 - protein, 739 aa, Acinetobacter baumannii
  misc_feature (88)..(88): Xaa can be any naturally occurring amino acid
MTSLAHHATENRSVAEFTEQAYLNYAMYVIMDRALPHISDGLKPVQRRIVYAMSELGLKSSGKPKKSARTVGDVLGKYHPHGDSACYXAMVLMAQPFSYRYPLIEGQGNWGSPDDPKSFAAMRYTEAKLSAYSELLLSELGQGTSEWQDNFDGSLKEPITLPARVPNILLNGTTGIAVGMATDIPPHNLREVVKGTIALIRNPQTSDEKLAEYIPAPDLPTKAEIITPPEELLKIQTTGRGSYRMRAVYTIEKNEIVITELPYQVSGSKVITQIADQMQAKKLPLVVDVRDESDHENPTRLVIVLRSNRIDAEAVMSHLFATTDLESSYRVNLNMIGEDGRPQVKSIRRILLEWIEIRKKTVTRRLQYHLNRIEKRLHILAGLLIAYLDIDTVIRIIREEDQPKPVLMEHFNIDEIQAEAILELKLRHLAKLEEMEIRHEQDELSAKAAIIREQLENPESLKNLIISELKEDAKKFGDERRSPIVARAEAVQIKEQDLMPAETVTVVLSEAGWVRAAKGADVDAENLNYRAGDQYLSHAVGKTNQRVYFLDETGRSYALPISNLPSARGLGDPLSSKLSPASGVSFIQVYLDDDESELIAASSAGYGFKTQTKQLDTNAKAGKTFLTVPDKAKALPLISAQNMTHLAVLSSAGRLLILDLAELPNLNKGKGNKLIQLEGKEQILSMTTLNLDEIIQVVAGQQHLKLKGDDLQKYMGKRASKGQLLPRGYQKANKLLIQR

SEQ ID NO: 6087 - DNA, 816 bp, Acinetobacter baumannii
  misc_feature (22)..(22): n is a, c, g or t
atgtcctttacccgatctcaantttttcttgcctgtgctttggcttctagcctgttgttcagtgcttgttctaaagaaaacaaaccacaaaaagaagatgcgctcacagcgaccgcacctgctacaggggaagcttcaaccattattgaacgcaatgctaaacagcgtttaattgaaactttgcaaaaacaatttaagaatgcaaatatcaacgtcaagattttagatattaagcctaccgaagttcctaatttatattgggttaaccttgaaggaatgacgtcggtttatacaacaagtgatggtaaatacctgattcaaggcgatgtcatccgtttaggcggtaaagaacttcataatatcggcgatagccttcaagcctcagaaaacaaaaagcatcttgctgctttaaaaaatgaagacttaattgtttatccagctaaaggcggtaaagctaaacatgtgatttatgtgtttaccgatgcaagctgtccttactgccataaattacatgagcatttagctgagattaatgagaaaggcattgaggttcgttacattgcatggccacgcggcgaacagtttatgccaactatggaagcggtttggtgtagtgcagaccgtaaaggtgcatttgaccaagctgtacagggcattagtattccacctgctcaatgtaaaaaccctgttcgcgaacaataccaacttggtctaaacatgggcgtaaatggtacaccagctatttataatgttgatggtgagtacttgggtggctacttaacaccagatgaattgattaaacgattggataaataa

SEQ ID NO: 6088 - protein, 271 aa, Acinetobacter baumannii
  misc_feature (8)..(8): Xaa can be any naturally occurring amino acid
MSFTRSQXFLACALASSLLFSACSKENKPQKEDALTATAPATGEASTIIERNAKQRLIETLQKQFKNANINVKILDIKPTEVPNLYWVNLEGMTSVYTTSDGKYLIQGDVIRLGGKELHNIGDSLQASENKKHLAALKNEDLIVYPAKGGKAKHVIYVFTDASCPYCHKLHEHLAEINEKGIEVRYIAWPRGEQFMPTMEAVWCSADRKGAFDQAVQGISIPPAQCKNPVREQYQLGLNMGVNGTPAIYNVDGEYLGGYLTPDELIKRLDK

SEQ ID NO: 6089 - DNA, 837 bp, Acinetobacter baumannii
  misc_feature (410)..(410): n is a, c, g or t
atgaaagtatggattgataaattacagcaattgcaatggcaaaaattagatcgactgagtgtagtggtccttgccattttaattttatggttatgctggaaactcgcttcatttttttggttggtgattgcgcctcctcaactgatgcaatttgatcgggtagaactcggttctcaacaaccacaaataccaaatattagtactttttcactttttaacgaaccttctgccaatgcggctcaagaaagcgtgaatttagaattgcagggtgtaatggtcggctacccaaaccggttttcctctgctgttattaaaattgataatactgctgagcgttatcgagttggtgaaaccattggttcaacttcttaccaattggcagaggtgtattgggatcatgttgtgttgantcaaggaaatggcagtactcgtgaacttcagttcaaaggtttgccaaatggtttatatcaaccgatgactccggatgcttcacaacaaagtgttacaccgtctcaacctacagagcctatgaatacggcccaacaggcattgggacaagcgatccagcagatgcaaggtaaccgagagcagtatctccgagatatgggggtaagtggtaactcaggtgaaggctatgaagttacagaacgtacaccgactgcacttagaaataagttaggtttaagacctggcgatcgaattgtctctttgaatggtcaaacggttgggcaagggcaaacggatgtgcaattacttgagcaggctcgtcgagcagggcaagtaaaaatagaaataaaacgtggtgatcaagtgatgaccatacaacaaaatttttag

SEQ ID NO: 6090 - protein, 278 aa, Acinetobacter baumannii
  misc_feature (137)..(137): Xaa can be any naturally occurring amino acid
MKVWIDKLQQLQWQKLDRLSVVVLAILILWLCWKLASFFWLVIAPPQLMQFDRVELGSQQPQIPNISTFSLFNEPSANAAQESVNLELQGVMVGYPNRFSSAVIKIDNTAERYRVGETIGSTSYQLAEVYWDHVVLXQGNGSTRELQFKGLPNGLYQPMTPDASQQSVTPSQPTEPMNTAQQALGQAIQQMQGNREQYLRDMGVSGNSGEGYEVTERTPTALRNKLGLRPGDRIVSLNGQTVGQGQTDVQLLEQARRAGQVKIEIKRGDQVMTIQQNF

SEQ ID NO: 6091 - DNA, 1278 bp, Acinetobacter baumannii
  misc_feature (998)..(998): n is a, c, g or t
atggataagcaaattatttttgaagacgaacacattagagccatttttttacaaggcgattctaatacattagttctctcttttggcgatttgattacccgggcgagtggcttatctatcaatgctgaaaagtctctaataaagtaccaatacaatgttattggggtgatgccaaaacaaaaatcatggttcccaaaggccagtatggttgagctggcaaaagtcattttgcctattattcagtgttttaaaaatattgtaggctatggcggctcaatgggtggctatgcagcaattaaatattcgaatttattaaatatgaatcgaatcattgcatttgtacctcagtattcaattgaccctgaacaagttgaagaccgacgctatgctgagttcttcgatgctgtcgcgaataaagacatgcaaattcagccgcaagatgtgaatgcaagtcgtgaatacattattgtttatgacccttacttttcaattgatcgcgaacattacttaaaaataaaagagatcttgccaagtttacatacaattcatttgccttttacaggacatgaagctttatctgtattggcaagctcaagccttttacatgattttattgagcatgaatttgatgaaacgtatttctatcaacaagttcgcaaaatcaaaaaacaaagcaagttctattatcgtaatgttcttgcaaatgtgctgacataccatgacagcatgttattgaaaatattgcgtcaaaatgactttcagttagatgaacgttatttagacaatccacttaagcaagcggtcacacgtagtcttattaaaacaaagcaagctacagaacaagattttcagaagcttggaattaaaattcagtatagccagcaagctaaaaaccctaaaaaaggttttaaaaatcaatttgaggcaatactagtatttaatttgattaatctaaagcttgaaacctacgctgtagatgtaatgttggcaaacccatnatatttgatcccaattatggcagaacacactggggttgttcagattgaattaaataatgaactttatttgttagggatgaatgaccgaaaaattattaaattgtttaaacagggtgatacactcacttcggatatgagtccgtttgttattaaacaatattctgatttctttgcgttaagctacaagcaattaaatttaaattgtgatgaacaaggtgtatgtgattacgttgaaggttctgttcagccatctcaacagtttgtattgaccagctattaa

SEQ ID NO: 6092 - protein, 425 aa, Acinetobacter baumannii
  misc_feature (333)..(333): Xaa can be any naturally occurring amino acid
MDKQIIFEDEHIRAIFLQGDSNTLVLSFGDLITRASGLSINAEKSLIKYQYNVIGVMPKQKSWFPKASMVELAKVILPIIQCFKNIVGYGGSMGGYAAIKYSNLLNMNRIIAFVPQYSIDPEQVEDRRYAEFFDAVANKDMQIQPQDVNASREYIIVYDPYFSIDREHYLKIKEILPSLHTIHLPFTGHEALSVLASSSLLHDFIEHEFDETYFYQQVRKIKKQSKFYYRNVLANVLTYHDSMLLKILRQNDFQLDERYLDNPLKQAVTRSLIKTKQATEQDFQKLGIKIQYSQQAKNPKKGFKNQFEAILVFNLINLKLETYAVDVMLANPXYLIPIMAEHTGVVQIELNNELYLLGMNDRKIIKLFKQGDTLTSDMSPFVIKQYSDFFALSYKQLNLNCDEQGVCDYVEGSVQPSQQFVLTSY

SEQ ID NO: 6093 - DNA, 618 bp, Acinetobacter baumannii
  misc_feature (13)..(13): n is a, c, g or t
atgaaaaaattgnttttgggtggtttgagtgcagcaattatggccgtatcgggtagtgcaatggcagcagattttgttgctggtaaagactacaccgtaatcgccaatccaggcaaagtggaagtaccggggaaaatcgaagttcgtgagttcttttggtatggctgtccgcactgttttaaacttgaaccacatatgcaaacgtggttaaaacaaattccgagtgatgtacgttttgtgcgtacgccagcagccatgaacaaagtatgggaacaaggggcacgtacttactatacatctgaggcattaggtgtacgtaagcgcacgcatttaccattattccatgcaattcaggtgaatggtcagcagatttttgaccaagcttctgcggctaaattctttactcgttacggtgtgcctgaacaaaaatttaatagcacttacaactcatttgctgtaactgcaaaagttgccgagtcaaataaacttgctcaacagtaccaattaacaggtgttcctgctgtagtggtaaatggtaaatatgtggtgcagggtgaagatggtaaagttactcaagtccttaattacttaattgaaaaagaacgtaaggcaaaataa

SEQ ID NO: 6094 - protein, 205 aa, Acinetobacter baumannii
  misc_feature (5)..(5): Xaa can be any naturally occurring amino acid
MKKLXLGGLSAAIMAVSGSAMAADFVAGKDYTVIANPGKVEVPGKIEVREFFWYGCPHCFKLEPHMQTWLKQIPSDVRFVRTPAAMNKVWEQGARTYYTSEALGVRKRTHLPLFHAIQVNGQQIFDQASAAKFFTRYGVPEQKFNSTYNSFAVTAKVAESNKLAQQYQLTGVPAVVVNGKYVVQGEDGKVTQVLNYLIEKERKAK

SEQ ID NO: 6095 - DNA, 780 bp, Acinetobacter baumannii
  misc_feature (632)..(632): n is a, c, g or t
gtgccgcacagctcgctaaatcctgtattgattcaacttgaacaggtctctgttcatcgtgatcagcgggatatattaaaaaaagttgattttgctctgcatgaaaatgaaattgtgaccttaattggtcccaatggcgcaggtaaatcaactttaattaaagttctacttggtattttaaagccaagtagtggacgcgtcataagcaataaaaaactaaaaatggcttatgtgcctcagaaatttaatccatctcatagtcttcctttacgggtacaagatttattagatcttgaaaagtgtagccctgcccttcgtcaggaaattattcaagacaccggtattgccaaactacaacaatcaaaagttcagcaactttctggtggagagcgccaacgtgtactgctagcacgtgctttacttagaaagccagatatcctcgttcttgatgagcccatgcaaggcttagatattcaatcagaagctgagctttatgaatatgtacgtagtctgccggagcgttatggttgtgccattttaattgtttcccatgatttacagtgggtcatgcagggaactcaacgcgttgtctgtttaaacaagcatatatgctgtagcggcttaccagaaantattcagcagcatcctgaataccaagcaatattcggtactcagcgagttttctatcaacatcatcatgatcactgtgcgcatggtgacgctgcacacccctgccctcacaatagcagacctcacattcacccggaaccggaagcttaa

SEQ ID NO: 6096 - protein, 259 aa, Acinetobacter baumannii
  misc_feature (211)..(211): Xaa can be any naturally occurring amino acid
MPHSSLNPVLIQLEQVSVHRDQRDILKKVDFALHENEIVTLIGPNGAGKSTLIKVLLGILKPSSGRVISNKKLKMAYVPQKFNPSHSLPLRVQDLLDLEKCSPALRQEIIQDTGIAKLQQSKVQQLSGGERQRVLLARALLRKPDILVLDEPMQGLDIQSEAELYEYVRSLPERYGCAILIVSHDLQWVMQGTQRVVCLNKHICCSGLPEXIQQHPEYQAIFGTQRVFYQHHHDHCAHGDAAHPCPHNSRPHIHPEPEA

SEQ ID NO: 6097 - DNA, 753 bp, Acinetobacter baumannii
  misc_feature (401)..(401): n is a, c, g or t
atgactttggttcaaattccgaaactaactaccactttggaagatttcttaaaaaatctggaaagtatagaaccattgtttgatgctttatcttcggtggtgtttttcatcaaaaataccgaagcacgttatgtctttgtcaatcaaacattagtaaatcgctgcggtctaaaagataaaactgcaatattgggaaaaacctcttctgaagtttttcctcattcacttggaaaaatatatacatcgcaagacttgcaagttattcgccgcggtaaaaagttaacagagcaattagaactacatttatatgcaaaaaatcagtcgggttggtgtttaacttataaagaaccattatttgatgcggatggaaacttagtaggaatagcgggtatttctaatgntttaaatgtgcctgaaaatacacatcctgctttttataaaatggttcaggttgaggaatatattaaaaagaattacgccgaaaccattactttggcgcatttgaccgcaattgctggcgtgtcggtggctcagttagaacgttattgcaaaaaaatataccatttaacgcctcggcaaatgattagcaaaattcgtcttcaagtcgccactgaactattggcgacagatttaccaatcactcaaattggtttgcgttgtggctataccgaccatagtgctttttgtcgtcagtttaagttgcatacaggcatgtcacctactttgtatcgggcctctatcaaaaatatttag

SEQ ID NO: 6098 - protein, 250 aa, Acinetobacter baumannii
  misc_feature (134)..(134): Xaa can be any naturally occurring amino acid
MTLVQIPKLTTTLEDFLKNLESIEPLFDALSSVVFFIKNTEARYVFVNQTLVNRCGLKDKTAILGKTSSEVFPHSLGKIYTSQDLQVIRRGKKLTEQLELHLYAKNQSGWCLTYKEPLFDADGNLVGIAGISNXLNVPENTHPAFYKMVQVEEYIKKNYAETITLAHLTAIAGVSVAQLERYCKKIYHLTPRQMISKIRLQVATELLATDLPITQIGLRCGYTDHSAFCRQFKLHTGMSPTLYRASIKNI

SEQ ID NO: 6099 - DNA, 627 bp, Acinetobacter baumannii
  misc_feature (493)..(493): n is a, c, g or t
atgaaatttctaaaatttttaacttttagcacgattcttaccttatccgcacatagctatgcgacagtgggtggtggacaaaaaattgaagtgttgggctatcagcaaaaagagaagaaactttatgtattaagacattatgaagatggccgaggacgtctgccacaactctattattatctattaaatagtaaatcgcctgataaacttatcgaggttaaatctctctatatcaatccaaaaacacataagattgattatgatcaagatagtacagcgtttaataaggcacttaataaaattaaaaagaatttaactcctttgatcgtaagtaatagtaagactgtaaaaattcaaacattaaaaactcatcagaatcaggtatcgtcttggtttgatccttcaggaaagatcacgcaatataaaacagaatatgttgtaaaatcgccgtctttacaaagtaagacccatgttgcggttcattacagcaaancaataaaaatttcccaaaattatagtgtgcctaaacacaataagaggttggttgtcgttaaatatttgggggttccagaagaaactggttacgacattgaagaccctgttttactactacctataaaaaaataa

SEQ ID NO: 6100 - protein, 208 aa, Acinetobacter baumannii
  misc_feature (165)..(165): Xaa can be any naturally occurring amino acid
MKFLKFLTFSTILTLSAHSYATVGGGQKIEVLGYQQKEKKLYVLRHYEDGRGRLPQLYYYLLNSKSPDKLIEVKSLYINPKTHKIDYDQDSTAFNKALNKIKKNLTPLIVSNSKTVKIQTLKTHQNQVSSWFDPSGKITQYKTEYVVKSPSLQSKTHVAVHYSKXIKISQNYSVPKHNKRLVVVKYLGVPEETGYDIEDPVLLLPIKK

SEQ ID NO: 6101 - DNA, 705 bp, Acinetobacter baumannii
  misc_feature (482)..(482): n is a, c, g or t
atgctgctggaaaaaattttacaatcacaagggtttggttcacgtaaatattgtcagcagttaataaaaaatggttcagtaattattgatggggaggttgtgagtgatctcaaaaagcagttctccccagaaaattttgagttttccgtttttggtcaaaattatcaatatagagaaaaaatttatattgctctaagaaaacctcaaggttttgagtgttctcatcatcctcagcatcatcaaagtgtttttagcctactgcctgagaccatgattcatcgtggtgtgcaggcggttggacgcttggatcaagacacaacgggtctgcttttacttactgatgatggtaaatatctacaagctttaactcatcctcgtaaacatgtaccaaaggtttatcacgttacaacttacgaccccgtaacccctgagcaaattgaaatgcttactcaaggtgttaatttacaccaagaaaagggggnatttgctgccacagatgtagcactactaggaactcatcaattaacgatgactattcatcaaggtgtttatcatcaagttaaaagaatgattgcagccgtaggcaataaagtcgagaagttacatcgacatcaaattggtcaattggttttacctgaaattgaggaagggggctgggtatatttgtcggagcaggaaaaacaactcgctcaaaatattatttaa

SEQ ID NO: 6102 - protein, 234 aa, Acinetobacter baumannii
  misc_feature (161)..(161): Xaa can be any naturally occurring amino acid
MLLEKILQSQGFGSRKYCQQLIKNGSVIIDGEVVSDLKKQFSPENFEFSVFGQNYQYREKIYIALRKPQGFECSHHPQHHQSVFSLLPETMIHRGVQAVGRLDQDTTGLLLLTDDGKYLQALTHPRKHVPKVYHVTTYDPVTPEQIEMLTQGVNLHQEKGXFAATDVALLGTHQLTMTIHQGVYHQVKRMIAAVGNKVEKLHRHQIGQLVLPEIEEGGWVYLSEQEKQLAQNII

SEQ ID NO: 6103 - DNA, 1725 bp, Acinetobacter baumannii
  misc_feature (165)..(165): n is a, c, g or t
atgacttaccctctatttgaaattaagctgctaactgctcttgatcatgctcaatttgaagaggcaatttgggcatttgaaattgatggagacatttctacattattactgattgattatgcattagaacaattccatcaaaaaaaagttcaagctgatgaaatntatcgggttcctgaacaaaaaattaagaaaattggtgaacaaaatttaggtctagaaaaaaatgaatcatatacatttgccgagctcttacaattcttaatttttactcaggcaaatgatgttaaagatgccttaagcaatatgctgttgggttctgttgagcaaacacaattgatcttgtctaaaagagcagaatattaccagttagctttaagagcacctaatcaattaaaaaatctatttttgttggtaaaacacatttatagctatccagccgagctgaaaaaacttttctttattagaacagtttcttttaaaaataaagtatatcaaccgattacgcctttgcttgctcatccggtactcacttcggttttatatatctcacatgactttagacagatttatatcacttattccgaatataaccggagcattggttttttctcttttctggatggtattcaccgtctggagcatttggttccttactaccattattttcaagaagggcatgtcgaggcaaaaaaatattcttctcaaacaggtattatcaatattcttggagatacctattttggtgaaatgtataccgaaaagcgtaagtctagagggcaaacagatgccttacagcaatatggatatcattattcatttgaaaaaatacagccctttttaggtaaaaatgacatcaacatcgctaactttgaagcagtattttctttagaaaatcaatcgccgttaaaagataaaaagccatttgttttaaaagcagatgctaaaaaaacattagaagaatttaagagcattcatctaaattatttggttttggcaaataaccatttgaaagattacggtgagcaaggattagcctatacattacaacagttggatcaggcgagtatttcttatattggcgctggactgaaccaaaaagatgctcacaattactttgaaatcacttttgagactaagcactatgcgatttttaatggttattggcatagagacatggcctatctggattatgacttttatgcgttaggatcaagaagtggagtagcttgcttaaatggcgttttacttgaacaaataatgcgttataagcaggctcatccagaacgcaaaattattgttatttgtcattggggtgtcgactttaagcctattacaaaagaccaaactaaactcgcgactattcttactcaagcaggagcggatctgatcgttggtcatggtgctcatactattcagccaatccagatcatcaatcaaaagcctgttgtttttaatataggcaatgcagtgtttaatagtgacggtgaatatgaacagcaaaatgctttgccatttggctgtatagctagacttgatttggcaaaagatttactccgtctttaccccatttacaccaataatttacaaacattttggcagccttatcctgtagatgctgaagatttctcaaaggccagtacttatatgacatctttactgacccctgagaattacatggcatcccaagataacttagggagatatcttgaagttaaattttaa

SEQ ID NO: 6104 - protein, 574 aa, Acinetobacter baumannii
  misc_feature (55)..(55): Xaa can be any naturally occurring amino acid
MTYPLFEIKLLTALDHAQFEEAIWAFEIDGDISTLLLIDYALEQFHQKKVQADEXYRVPEQKIKKIGEQNLGLEKNESYTFAELLQFLIFTQANDVKDALSNMLLGSVEQTQLILSKRAEYYQLALRAPNQLKNLFLLVKHIYSYPAELKKLFFIRTVSFKNKVYQPITPLLAHPVLTSVLYISHDFRQIYITYSEYNRSIGFFSFLDGIHRLEHLVPYYHYFQEGHVEAKKYSSQTGIINILGDTYFGEMYTEKRKSRGQTDALQQYGYHYSFEKIQPFLGKNDINIANFEAVFSLENQSPLKDKKPFVLKADAKKTLEEFKSIHLNYLVLANNHLKDYGEQGLAYTLQQLDQASISYIGAGLNQKDAHNYFEITFETKHYAIFNGYWHRDMAYLDYDFYALGSRSGVACLNGVLLEQIMRYKQAHPERKIIVICHWGVDFKPITKDQTKLATILTQAGADLIVGHGAHTIQPIQIINQKPVVFNIGNAVFNSDGEYEQQNALPFGCIARLDLAKDLLRLYPIYTNNLQTFWQPYPVDAEDFSKASTYMTSLLTPENYMASQDNLGRYLEVKF

SEQ ID NO: 6105 - DNA, 918 bp, Acinetobacter baumannii
  misc_feature (584)..(584): n is a, c, g or t
atgaaacctaaaaaattaaatcaagttactgattttgatataaaacttctcaaaatatttaaaacggtttgcgactgtcacagctttacatctgccgaaagtattttaggtattagccgctctgcaattagtttgcatatgagtgatttagaaaatcgtttgggcattcggctatgtcagcgaggtcgtgctggatttgccctgaccgacgaagggcgggaaattttagaatatatcgaagtgcttacggcagcgattgaagacttccgctctaaagtcaaccaaatgcataaccgccttaagggtgagtttaatatcggcattattaataatcttgtgactatgcctagaggctatatcaccaacaccttgacccaacttgcagaggaacatgccgaagttattattaatattagtatgagcaccctttcagatattgagtgccgtgtgctcgataaccgtttacatgcaggcgttattccccttgtgatgcctttgtctggtttagactatttcgatttatatagtgaaagttcgtttttatactgcggcaaaaatcatcctttatttaaccaatgtagtancatcaatttaaatgaattaaaaaaatggcaagctattcttcctaattatgccattacctcggaagcggtaaagttacatcaacttttagattgtaaagcgacagcaagtgaccgcgaaggtattgcctttctcattttaaccggaaaatttttaggttttttacctgaccactatgcaaaaaaatgggttgaagatggtgttatgcaacctgttttaaaagataaaatgcactacagcacccctatgtgcttaattactcataagggtaaaagtcacaataatattttaaaaacctttatggaaatgcttgagaagcgaatagctaacaattaa

SEQ ID NO: 6106 - protein, 305 aa, Acinetobacter baumannii
  misc_feature (195)..(195): Xaa can be any naturally occurring amino acid
MKPKKLNQVTDFDIKLLKIFKTVCDCHSFTSAESILGISRSAISLHMSDLENRLGIRLCQRGRAGFALTDEGREILEYIEVLTAAIEDFRSKVNQMHNRLKGEFNIGIINNLVTMPRGYITNTLTQLAEEHAEVIINISMSTLSDIECRVLDNRLHAGVIPLVMPLSGLDYFDLYSESSFLYCGKNHPLFNQCSXINLNELKKWQAILPNYAITSEAVKLHQLLDCKATASDREGIAFLILTGKFLGFLPDHYAKKWVEDGVMQPVLKDKMHYSTPMCLITHKGKSHNNILKTFMEMLEKRIANN

SEQ ID NO: 6107 - DNA, 2076 bp, Acinetobacter baumannii
  misc_feature (1585)..(1585): n is a, c, g or t
atgacatcattgcccactttagctagctcaaaccagcacaatttagaaacgtatattaatagagaactctctttattagagtttcataaacgggtgcttgctcaagccaaagatattgaacacccattactggaacgtttgaattttttaattattttttcgcgtaatctggatgagttttttgaaattcgtgtggcaagtttaatccagaaaattagcttgatgagtcaggcaaccggaccagaaggtttaccgttagtagaagtattaaagcaaatttcaaaaaatgctcatgaggcggttgaagagcaatataaaatcttaaactatactttgttaccgcaactccaaggctatggcgttcattttattcagcacggcgatatattagaaaagcataaagaatggattaaagaatacttttttaaagaagtacaacctgtagttacgccaatcagtctagatccagcacatccatttccacggctggtcaataaaagtctaaacttcattgtaactttagaaggtaaagacgcttttgggcgtcaaattgatttagctattgtgccggcaccgcgttcgttaccaagacttgttaaaattccagaacatatttctggcggtgcagagcattacattctgctctctgctattatccatcagcacatttccgatttatttccgggcatgaaagcgacgggctgtcatcaatttcgtgtaactcgaaatgccgatttaaccgtttctgaagatgtagaggatttggctgctgctttaaaaggtgaattatcttcacgccgttttggccaagcagttcgtttggaagtagcaaaaaaatgtcctgaagaaattgctaactatttattagagcaattcgatttagatgcagaacatctttactacgtcgatggccctgttaatttagcccgttttatctcaaactttgatttaccagagttacgctataaaccatatcaacaagttttgcctcagcttttatacactaaaaaaccgatttttgatgtgttaaaagcaggagatgttctacttcatcatccatttgattcttttgcacctgttatcaagttccttcgggaagctgcacaagatccaaatgttttagcaattaaacaaaccttataccgtagtggtgccaactcggaaatcgtacagctacttgcagaagctgcgcgtaatggtaaagaagtgaccgcggttattgagttgcgggcacgttttgatgaagaatcaaatattgaagtcgctaacgttttgcaagaagctggcgccgtcgtggtgtatggcattgttggctataaaactcacgctaaaatgattttagtggttcgccgtgaacaagacaaaatcaaaagatatgtgcatttaggtacaggtaactatcatgcagtgaatgccaaaatctataccgattttggtttgctgaccaatgatgcggaaatttgtgaagacgtccataaaattttccaagaactgaccggtatgggcaaaatggcaaagcttaaaaaactttttcatgcgccatttaccttacattctcaactgttagaacttattgaacaagaanttaaaaatagccttgctggtaaaaaagcacacatcatcattaaagtgaatgcgcttactgaaccacagctcattagcgcgctttataaagcatcacaagctggtgtaaaaattgatttaattattcgttcaatttgctgcttaagaccacaagttgcagggctctcagagaatattcgagtacgttcaatcgttggtcgttatttggagcatacgcgggtttactatttttataatgatggcgatacaaaagtttattgtgcaagtgcagactggatggaacgtaatttgttctctcgtattgaaacctgcttcccaattgaaaataaaaaattaaagaaacaagtcattgaagatggtctaaataactatttaaaagacaatcgtcaagcatgggaattacaggctgatggaacatgggtgcaatgtcatcctaagccggaagaagaactttatattgcacagcaacacttgatgaacttagctgggtaa

SEQ ID NO: 6108 - protein, 691 aa, Acinetobacter baumannii
  misc_feature (529)..(529): Xaa can be any naturally occurring amino acid
MTSLPTLASSNQHNLETYINRELSLLEFHKRVLAQAKDIEHPLLERLNFLIIFSRNLDEFFEIRVASLIQKISLMSQATGPEGLPLVEVLKQISKNAHEAVEEQYKILNYTLLPQLQGYGVHFIQHGDILEKHKEWIKEYFFKEVQPVVTPISLDPAHPFPRLVNKSLNFIVTLEGKDAFGRQIDLAIVPAPRSLPRLVKIPEHISGGAEHYILLSAIIHQHISDLFPGMKATGCHQFRVTRNADLTVSEDVEDLAAALKGELSSRRFGQAVRLEVAKKCPEEIANYLLEQFDLDAEHLYYVDGPVNLARFISNFDLPELRYKPYQQVLPQLLYTKKPIFDVLKAGDVLLHHPFDSFAPVIKFLREAAQDPNVLAIKQTLYRSGANSEIVQLLAEAARNGKEVTAVIELRARFDEESNIEVANVLQEAGAVVVYGIVGYKTHAKMILVVRREQDKIKRYVHLGTGNYHAVNAKIYTDFGLLTNDAEICEDVHKIFQELTGMGKMAKLKKLFHAPFTLHSQLLELIEQEXKNSLAGKKAHIIIKVNALTEPQLISALYKASQAGVKIDLIIRSICCLRPQVAGLSENIRVRSIVGRYLEHTRVYYFYNDGDTKVYCASADWMERNLFSRIETCFPIENKKLKKQVIEDGLNNYLKDNRQAWELQADGTWVQCHPKPEEELYIAQQHLMNLAG

SEQ ID NO: 6109 - DNA, 1590 bp, Acinetobacter baumannii
  misc_feature (1156)..(1156): n is a, c, g or t
atgcatttgacccaagaaaataacttaaatgtagatgctagattgctaaatatagaaaacctttcaatctctacgcaagatcagattttattggaaggtctcaatttacacttacaagccagagatacgcttgcaattgtaggtgagagtggttcaggtaaaacaataagctgtttggcgatgatgggattactaccagaaaaattaaaaacatctggtcgtattattattgattcaaaaaatattttagaaatagacgaaaagacgcaaacacacatacgcggccgccaaattgccatgatttttcaggagccttctacggctttaaatccattgcatcgtgttgaaaaaattgtcggtgaaaattttattttacaaggtgggtcaaaagcgaaagctcaacagcaggtaattcaattattaaaagatgtaggaattgctaatccagagtacattttaaaacgttatccgcatgagctttcaggtggtcaaaaacagcgggtgatgattgcggctgcgctagctcttcaacctaaaattttaattgcagatgaaccaactaccgcgcttgatgtgattttacagacgcaaattttagaattattaaaatctttgcaaagcaaatatggtatggcgctgattttaattagccatgatttgaacgtggtacgccgttatgccgatgagctgattgtattacacaaggggcaagttgtagagcaaggtcagcttcagcaaatctttaaaaatcctgcgtcaatttatacccagcaattgttagatcatgatcttggtttcgctgagcgatattcaaccagccataagattttatctgttcaacaactcaatgttaaatatccaatacgacgtggtttctttaaccgaattcagggttataccaatgcggttgaaaatgtaaattttgagcttgctcaaggcgaagcattaggcattgtgggtgaaagtggatccggaaaatcttcattggctttggctctggttcgattaattaaaagtgagggacagattaactttctagggcaagatataaaccgcttagaacaaaaagctttacgcaagatcaggtcagacttacagattgttttccaagatccatttggtagtctaaacccacgtatgacggtagggcagattnttgctgaagggttaaaagtcaaagcgatagctgataaagaaattaaacagcaagttgaatcagcgttgataaaagttgagttggctgagggctttcaacatcgctatccacatgaactttctggtgggcaacgacaacgtgttgctttagcgagagctttagtagttcaacctaaacttttaattttagatgaaccaacgtctgccttagaccgaaccacgcaaaaagcgatgattcaattattacgacgtttacagcaaacagagtacttgagctatatttttattagtcatgatttaaatgtggtcaaagcactgtgtcataaagtgatggtattacgacatgcaaaagttatggaatatcagccgactgagctgttgtttaatgctccaaaaactgaatataccaagcagttaattgcggcaagttgttaa

SEQ ID NO: 6110 - protein, 529 aa, Acinetobacter baumannii
  misc_feature (386)..(386): Xaa can be any naturally occurring amino acid
MHLTQENNLNVDARLLNIENLSISTQDQILLEGLNLHLQARDTLAIVGESGSGKTISCLAMMGLLPEKLKTSGRIIIDSKNILEIDEKTQTHIRGRQIAMIFQEPSTALNPLHRVEKIVGENFILQGGSKAKAQQQVIQLLKDVGIANPEYILKRYPHELSGGQKQRVMIAAALALQPKILIADEPTTALDVILQTQILELLKSLQSKYGMALILISHDLNVVRRYADELIVLHKGQVVEQGQLQQIFKNPASIYTQQLLDHDLGFAERYSTSHKILSVQQLNVKYPIRRGFFNRIQGYTNAVENVNFELAQGEALGIVGESGSGKSSLALALVRLIKSEGQINFLGQDINRLEQKALRKIRSDLQIVFQDPFGSLNPRMTVGQIXAEGLKVKAIADKEIKQQVESALIKVELAEGFQHRYPHELSGGQRQRVALARALVVQPKLLILDEPTSALDRTTQKAMIQLLRRLQQTEYLSYIFISHDLNVVKALCHKVMVLRHAKVMEYQPTELLFNAPKTEYTKQLIAASC

SEQ ID NO: 6111 - DNA, 1941 bp, Acinetobacter baumannii
  misc_feature (1474)..(1474): n is a, c, g or t
atgaaattttcaaaaatactggttgccaatcgtggtgaaattgtagttcgggtgatgcaaacagccaaggcaatgggttaccaaaccgtcgcagtttattccgatgcagaccgtaatgctcgccatgtgcaagaggctgatgaagctgtttatattggtgcttcaaaagtatcggagtcttatctctccatcgctaaaattattgaagcttgcaaaaaaacaggggcggatgcagttcaccccggctatggttttttgtcagaaaatactgattttgctcaggcatgtatcgataatcagattacctttattggacctaccgcttctgcaattgagttaatgggcagtaaacgcctttcaaaaatcgccatgattgaggcgggcgtcccttgtgtgccggggtatgaaggtgaccgacaagatctcgaatatttaacaactcaagctgagcagattggctttccaattatggtcaaagcttcttcgggtggtggcggtcgtggcatgcgtttggtacagcaaacatccgagttgtttgaggcattacaaaccgcacgttcagaagctgaaaatgcttttggttctggcgagctcattttagaaaaagcagttattgctccgcgtcatgtcgaaatccaggtttttggtgatacacatggtaattatgtgtatttgtttgagcgcgattgttcaatccagcgccgtcatcagaaggttgttgaagaggcaccgtgtccagtgatgacgcctgaactacgtcagcaaatgggcgaggcagctgtagcagcggcaaaagcatgtgcttatgtcggggcaggtacagttgagtttttgctagatgcatcgggtgcattttactttttggagatgaatacccgtttgcaagtggagcatcctgtcactgagcttattacggggttagatttagttgaatggcagttacgtgtggcgaatggtgagcagttacctttaaagcaacaggaattgaccttaaatggacatgcgatagaagtgcgtttgtatgcagaagacccacgtcaggactttttgccacaaacaggaaaagttttacgctggaagcctgcaactttgccaaatgtgcgaattgatcatggcatgttagcaactgatgaagtcagtccattttacgatccgatggtagcaaaggtgattgcatatgggaaaacccgtgaggatgcgattcgcttactggctcgtgcagtcgatgatagtgttttacttggagtgaatagtaataaacagttcttggtcaatttactgcgccatccagttgttgttacaggggataccaatactgcattcatccaacagcatttccaaaatgatcccagcttacaccatcaagttttatctttagaaaccttagcgattgctgcagcactatttagccaaagtaaaggtactagagtgtggcaaactgggcttggtgtgccattaccgttaaaattacaanctgccgatcagcaaattcaattgcagctttcatctgtaaataacacattcacggtacagttctgtgatcaagtagtttgtattgatgtgcttgagaaaacgccagagcaactagtttacctaattgatggtgtacgtcgtcgtgtgcagtatgtattagatagtgatcagctttatctagatcgggataatggtaatgttttgatacgcaatatgacttacgctgcaccagaagctaccgatgtagcgggagacggcaaaattcgagcaccgatggatggggctgtggtgaatattctggtcaatgaaggcgatcaagtagtgaagggccaaacattattgattcttgaagctatgaaaattcagcaacagattaaatctgatgtggatggtgtagtcgatgaaattttaggtcagcaaggtcaacaagtgaaaaaacggcaaatgctgtttagtatccaaatttaa

SEQ ID NO: 6112 - protein, 646 aa, Acinetobacter baumannii
  misc_feature (492)..(492): Xaa can be any naturally occurring amino acid
MKFSKILVANRGEIVVRVMQTAKAMGYQTVAVYSDADRNARHVQEADEAVYIGASKVSESYLSIAKIIEACKKTGADAVHPGYGFLSENTDFAQACIDNQITFIGPTASAIELMGSKRLSKIAMIEAGVPCVPGYEGDRQDLEYLTTQAEQIGFPIMVKASSGGGGRGMRLVQQTSELFEALQTARSEAENAFGSGELILEKAVIAPRHVEIQVFGDTHGNYVYLFERDCSIQRRHQKVVEEAPCPVMTPELRQQMGEAAVAAAKACAYVGAGTVEFLLDASGAFYFLEMNTRLQVEHPVTELITGLDLVEWQLRVANGEQLPLKQQELTLNGHAIEVRLYAEDPRQDFLPQTGKVLRWKPATLPNVRIDHGMLATDEVSPFYDPMVAKVIAYGKTREDAIRLLARAVDDSVLLGVNSNKQFLVNLLRHPVVVTGDTNTAFIQQHFQNDPSLHHQVLSLETLAIAAALFSQSKGTRVWQTGLGVPLPLKLQXADQQIQLQLSSVNNTFTVQFCDQVVCIDVLEKTPEQLVYLIDGVRRRVQYVLDSDQLYLDRDNGNVLIRNMTYAAPEATDVAGDGKIRAPMDGAVVNILVNEGDQVVKGQTLLILEAMKIQQQIKSDVDGVVDEILGQQGQQVKKRQMLFSIQI

SEQ ID NO: 6113 - DNA, 861 bp, Acinetobacter baumannii
  misc_feature (641)..(641): n is a, c, g or t
atggataagacttttgaatctttttggattacctgtaaagatggttatcagcttgcagctcaattttatcctgctcaagaaaagaaagctgaataccctatcttgatttgtccagcaacaggtataactaaaaacttttatcactctttcgcaacatggttaagccaacaaggctatgatgtattgagttttgacttccgtggtattggcgaatccctacatggagctttaaaacaaagtaccgcaagtattaccgactggggaacacttgatattcctgctgcaattgatgctttattaataaaaacgaaagcaaatcaagttattcttattggacatagtgctggcggacaactactaggagtcgtacctaactataataaagtcgcaaaagtgataacggttgcaggttcaactggacatattaaaggccttaaaggaaaaaccaaggttttagcgccagttatgtttaatcttatcttccctatttctagtcttgttaaaggttatggagcaactcaattcattggtatgggagaaaacctacctaaaaaagttgctcaacaatggcgagagttttgtagccgtcccggatatgtaaaaaacgccataggcaagacaatttttcatgattttcattnagatattcaatgtccaattactgctatttgggctgatgatgatgagattgcaaccaaacgtaacgtacaagaattattaagtttatatccaaatgcgaataaaaaaatgattgaacttagcccaaaagatttaggctataaatcaattggccatatgctgttatttaaaaaatcacatcaaaaactttggtctattttagaacaagaaattaaacattaa

SEQ ID NO: 6114 - protein, 286 aa, Acinetobacter baumannii
  misc_feature (214)..(214): Xaa can be any naturally occurring amino acid
MDKTFESFWITCKDGYQLAAQFYPAQEKKAEYPILICPATGITKNFYHSFATWLSQQGYDVLSFDFRGIGESLHGALKQSTASITDWGTLDIPAAIDALLIKTKANQVILIGHSAGGQLLGVVPNYNKVAKVITVAGSTGHIKGLKGKTKVLAPVMFNLIFPISSLVKGYGATQFIGMGENLPKKVAQQWREFCSRPGYVKNAIGKTIFHDFHXDIQCPITAIWADDDEIATKRNVQELLSLYPNANKKMIELSPKDLGYKSIGHMLLFKKSHQKLWSILEQEIKH

SEQ ID NO: 6115 - DNA, 1701 bp, Acinetobacter baumannii
  misc_feature (1481)..(1481): n is a, c, g or t
atgaaaatgtcacgtcgtgcatacgcagaaatgtttggtccaacggttggtgatcgtattcgtttggctgacacagcgctttttattgaagttgagcaagacttaacgacatatggtgaagaagttaaatttggtggcggaaaagttattcgtgacgggatgggacaatctcagcttctagctgatgaagttgccgatacagtcataaccaatgctttaattgtagattggtggggaattgttaaagccgatgtgggcttaaagaatggacgaatctggaaaatagggaaagctggaaaccctgatattcaacccgacattactattcctttaggtgcagcgacagaagtaattgcaggtgaaggacaaattttaacagctggtggtattgatactcacattcactggatctgtcctcagcaagttgaaaccgcgctgatgtctgggacaacgacaatggtgggtggtgggacaggaccagcagcaggtacttcggcaacgacagtgactccagggccttggcatatagcgaccatgttgcaggcgattgatgatttgcctatgaatattggcttgttaggtaaagggaatttaagtttacctgaccccattcgcgagcaaattaaagcaggagtaattgggttaaaactacacgaagattggggttcaacacctgcggctattgataactgtttgagcgttgcagatgagtatgatgtacaggtcgcaattcatacggatacattgaatgaaggtggttttttagaagaaacgctagcggcatttaaagaccgtacgattcatacgtaccataccgaaggtgcgggcggcgggcatgctcccgatattttaaaagcaattgggcaaagtaatgtcttgccatcttcgaccaacccaacacgaccttatacgatcaataccattgatgagcatttagatatgctcatggtttgccatcatttagaccctgcaattgctgaagatattgcttttgcagaaagtcgtattcgccgtgaaaccattgctgctgaagatattttacaagacttaggcgcaattgccatgatgtcatctgattctcaggcaatgggacgtgtgggtgaagtgattttacgaacttggcaaactgcccacaaaatgaaagtacaacgtggcccattagagggtgacaatgagtttcatgataacaatcgcgttaaacgctacattgccaaatatacaattaacccggcaattacccatggtttaagtcatgaaattggttcggttgaagtcggaaaacttgctgatctggtgttatggaagccagccttttttggtgtgaaaccttccatgattattaaaggtggcatgattgcagcggcacctatgggtgacattaatgcttcaattcctacacctcaaccagtgcattatcgcccaatgtttggggcttatccgcgtggtgtacataacacctgtattacctttttatctcaagncgcaattgatgaaaaagttgctgagaagctaaaccttaaaaagttaatcagtccctgtaaaaacacgcgttcaattaccaaagccgatatgaaacataatacatattgtcctgttatgcaggttcatcctgagacttacgaggtgcgggccgatggtgaattactaacgtgtgaacctgctgacgtattaccgatggcacaacgttatttcttgttttaa

SEQ ID NO: 6116 - protein, 566 aa, Acinetobacter baumannii
  misc_feature (494)..(494): Xaa can be any naturally occurring amino acid
MKMSRRAYAEMFGPTVGDRIRLADTALFIEVEQDLTTYGEEVKFGGGKVIRDGMGQSQLLADEVADTVITNALIVDWWGIVKADVGLKNGRIWKIGKAGNPDIQPDITIPLGAATEVIAGEGQILTAGGIDTHIHWICPQQVETALMSGTTTMVGGGTGPAAGTSATTVTPGPWHIATMLQAIDDLPMNIGLLGKGNLSLPDPIREQIKAGVIGLKLHEDWGSTPAAIDNCLSVADEYDVQVAIHTDTLNEGGFLEETLAAFKDRTIHTYHTEGAGGGHAPDILKAIGQSNVLPSSTNPTRPYTINTIDEHLDMLMVCHHLDPAIAEDIAFAESRIRRETIAAEDILQDLGAIAMMSSDSQAMGRVGEVILRTWQTAHKMKVQRGPLEGDNEFHDNNRVKRYIAKYTINPAITHGLSHEIGSVEVGKLADLVLWKPAFFGVKPSMIIKGGMIAAAPMGDINASIPTPQPVHYRPMFGAYPRGVHNTCITFLSQXAIDEKVAEKLNLKKLISPCKNTRSITKADMKHNTYCPVMQVHPETYEVRADGELLTCEPADVLPMAQRYFLF

SEQ ID NO: 6117 - DNA, 672 bp, Acinetobacter nosocomialis
  misc_feature (190)..(190): n is a, c, g or t
atggcaaaagactttaatagccctaaagtagtcgaaggatatgatgcgcatattcgtaaattaattccgggctatgatgtgatccaccaacaggtggatgccattttgcagtcggtgttgcgaccagatcctcatatcttaattgtgggctgtggtacgggttacgaactcgaatatttacttaaaaganatccaaactggcaatttacagcggttgatccatctttaaccatgctgcaaaaagctcaggagcaggtggagattttaggtaaatctacccaagtcacttttgttcacggtgaaacttcagctttacctctcgagagttgctttgatgctgcactttctattctcgtggctcattttattgcagatgacataaaaccagccttctttaaggatatttatgatcgcttaaaagaaaaggcgcctttacttacctatgacctcatgacttgtgtaaatctacagcagcttcaagcattacgttatttgtgtttggctcaagggttaacagaagaacaatgtcaaaaaatgttggagcgtatggctgaggacttttttagtttaacgactgaaggatatataaaacttttggaaaagacaggctttgaaagcgtacagccatatacgcaaattttgacttatcaggggtttatggcaaaaaaataa

SEQ ID NO: 6118 - protein, 223 aa, Acinetobacter nosocomialis
  misc_feature (64)..(64): Xaa can be any naturally occurring amino acid
MAKDFNSPKVVEGYDAHIRKLIPGYDVIHQQVDAILQSVLRPDPHILIVGCGTGYELEYLLKRXPNWQFTAVDPSLTMLQKAQEQVEILGKSTQVTFVHGETSALPLESCFDAALSILVAHFIADDIKPAFFKDIYDRLKEKAPLLTYDLMTCVNLQQLQALRYLCLAQGLTEEQCQKMLERMAEDFFSLTTEGYIKLLEKTGFESVQPYTQILTYQGFMAKK

SEQ ID NO: 6119 - DNA, 1602 bp, Acinetobacter baumannii
  misc_feature (1527)..(1527): n is a, c, g or t
atgaaccaattacaaagcaagattaatgttcgaagcgaagacttcaaaacaaaccagcaagccatgcaaacattggtcacagatctcaaacaagttgcccagcgtattgctttaggcggtggtgaaaatgcccgtcaaaaacatttggctcgaggtaaacttttaccccgtgaacgtattgatcaactgattgatgtcggcacggcatttttagaaattggtcaattggcagcgtacaacgtttatgaagatgatgttcctgctgcgggtgtgattgcaggtattggtcaagtcaacggcatcacttgcatgatcgttgctaacgatgcaacggttaaaggtggaacgtattacccacttacggttaaaaagcatttacgcgcacaagaaattgctgaacaaaatcacttgccttgtatttatttagtagattcaggcggtgcctatttaccaatgcaagatgaggttttcccagaccgtgatcactttgggcgtattttctataatcaggcacgcatgtcgagtcttggtattgcccaaattgccgtagtaatgggtagctgtaccgcaggtggtgcttatgtaccagcgatgtctgatgaaacgattattgtccgtaatcaaggtacgattttcttaggtggacctcctttggtaaaagctgcaactggcgaagtggtaagcagtgaagatttaggcggtggcgatgtacacacacgtctttcaggggtagctgaccatttagccgaaaatgatgaacatgcaattgcgattgcgcgaaacattgttgcgaacttaaataaaaagccaaatgagttaaacaaacaaattgatgaaccattatttgatgcatcggaactctatggcgtggtgccaagtgatgcgcgtaaaccttttgatgtacgtgaagtgattgcgcgtattgtagacggctctcgttttgacgagtttaaagcccgctttggctcaacacttgtaacgggtttcgcttctctctacggcatgccagtcggcattattgccaataacggaattttattttccgagtctgcacaaaaaggttcgcactttattgagctatgtactcagcgcaatattccattgttatttatacaaaacatcactggctttatggttggtcgccagtatgaaaatgaagggattgccaaacacggcgctaaactggtgatggcagttgccactgcaaatgtccctaaactcaccctaattattggcggttcatttggtgcaggtaactacggtatgtgcggccgtgcttattcaccacgctttttatggacttggccgaactcacgtatttcagtcatgggcggcgaacaagcagcaagcgtactttcgactttaaaacgtgaccagattgagcaaaaaggtgccgagtggtcagcgcaagaagaagacgaatttaaacaaccaattcgtgaacaatacgagcgccaaggccatccatactatgcttctgcccgcctttgggacgacggtgtcattgacccagcgcaaactcgtcangtacttggtttaagccttgctgcggccatgaatgctccaatccagccaaccaaatttggcgtgttccgcatgtaa

SEQ ID NO: 6120 - protein, 533 aa, Acinetobacter baumannii
  misc_feature (509)..(509): Xaa can be any naturally occurring amino acid
MNQLQSKINVRSEDFKTNQQAMQTLVTDLKQVAQRIALGGGENARQKHLARGKLLPRERIDQLIDVGTAFLEIGQLAAYNVYEDDVPAAGVIAGIGQVNGITCMIVANDATVKGGTYYPLTVKKHLRAQEIAEQNHLPCIYLVDSGGAYLPMQDEVFPDRDHFGRIFYNQARMSSLGIAQIAVVMGSCTAGGAYVPAMSDETIIVRNQGTIFLGGPPLVKAATGEVVSSEDLGGGDVHTRLSGVADHLAENDEHAIAIARNIVANLNKKPNELNKQIDEPLFDASELYGVVPSDARKPFDVREVIARIVDGSRFDEFKARFGSTLVTGFASLYGMPVGIIANNGILFSESAQKGSHFIELCTQRNIPLLFIQNITGFMVGRQYENEGIAKHGAKLVMAVATANVPKLTLIIGGSFGAGNYGMCGRAYSPRFLWTWPNSRISVMGGEQAASVLSTLKRDQIEQKGAEWSAQEEDEFKQPIREQYERQGHPYYASARLWDDGVIDPAQTRXVLGLSLAAAMNAPIQPTKFGVFRM

SEQ ID NO: 6121 - DNA, 1248 bp, Acinetobacter baumannii
  misc_feature (310)..(310): n is a, c, g or t
atgttccgacagcaaaatctttatcttttgctcttttccttatattgggcacaaggtttacctgtaggttttatgacgcatgccttacctgtcatattaagagctcaaggtgtgtctcttgcccatattggtggttttgggctgctcatgttgccttggtcaatcaaaatattttgggcaccgtgggtagatcgacatgccatctcgcatttaggtcactatcgtagctggattttacctgctcagtttttgacggtgggtgtactttgtattttatcttttttccctatacaagttttagatcagcctntttatctctttattttttttattacgctgttatttatgaacttaacaggcgcaactcaagatatcgcgaccgatgctttagcggtcaatttattgcaacacgatcagcaacattggggaaatacttttcaagttgtaggttcacgacttggttttattgtaggcgggggagccgtgttatggtgcctagactggttatcatggcagccgacttttctattattagccgctttagtctttattaataccttacctattttactatttaaagagccatctcatacttctcattcacctcatcaatatagccaaccaagtctagttacaaagattaaatcttacttggggtacttctctcaaaataaggaacttcgttcttggttaatcgtccttataacttttaaggttgcagatggtttagccgggccattacttaaacctttaatggtggatatgggcttaagttttactcagattggtatttacatcaccatgcttggggctattgctgctttattgggggcacttattgctggctggatgttaaaatatatttctaggtctacagcattaatggctttttcaatattaaaaattatgagtttagggggctatgcgtatttggcttatgcttatgaacaaaaggtaaagataaatgtatggcttatctatgccgtaaatgccctggaagatgcctttgctgccatgctactggtcgtgatgttaactttggttatgcattacagtcgaaaaaactatgcgggtaccgattttacttttcaggtttcagtcatggcgacagtcagtggtggcctttacagctttagtggagtcattgcagatgtgcttggttatttccattatttgatagctattgtcagtattgcggtactctttttaattcctatttacttatggaaagctgccaaaactgtataa

SEQ ID NO: 6122 - protein, 415 aa, Acinetobacter baumannii
  misc_feature (104)..(104): Xaa can be any naturally occurring amino acid
MFRQQNLYLLLFSLYWAQGLPVGFMTHALPVILRAQGVSLAHIGGFGLLMLPWSIKIFWAPWVDRHAISHLGHYRSWILPAQFLTVGVLCILSFFPIQVLDQPXYLFIFFITLLFMNLTGATQDIATDALAVNLLQHDQQHWGNTFQVVGSRLGFIVGGGAVLWCLDWLSWQPTFLLLAALVFINTLPILLFKEPSHTSHSPHQYSQPSLVTKIKSYLGYFSQNKELRSWLIVLITFKVADGLAGPLLKPLMVDMGLSFTQIGIYITMLGAIAALLGALIAGWMLKYISRSTALMAFSILKIMSLGGYAYLAYAYEQKVKINVWLIYAVNALEDAFAAMLLVVMLTLVMHYSRKNYAGTDFTFQVSVMATVSGGLYSFSGVIADVLGYFHYLIAIVSIAVLFLIPIYLWKAAKTV

SEQ ID NO: 6123 - DNA, 1794 bp, Acinetobacter baumannii
  misc_feature (1406)..(1406): n is a, c, g or t
atgtcacttacgtccaatttgcggcagtttcaatctgccgctcgtctggagcaaattttaggctccgtacatgatatcaataatgatttttcttggtccgcagctatcgagcgtgatgagaaagagcaatatccacagcgagctgttgattttctgaatgcggtgggtatgaaccgtttctatgtgccttcagagcttggaggccgtatggaaattggtgaagagttgttatatctgcatcgtgtgttggcacgacgcgatctaactattaattcaacctatagcacgaatgcttggtctgtgatcgtatggatcggtggtaatgcgaatcaatgtcaaaacatcgctaaccgaattttgagtggtgctgctccagcgctggcttatagtgagaaagcgcatggtgctgacctgttatctagtgaagtgactgcgcaaccttccgacagtaagtacgtcttaaatggtgagaaatggtcgatcaatcgcgccactttaggagattctttaagtctgattgctaaaacatcgaacgatcgtggaccacgtagtttaagtgcattctggctcgataagcgtcatatggcttctaaaggaacgtatagcctgaaccgtcttccaacagtaggtatgcgtggtctagatatcagcggtattggttttaataacgctgaaattcataaagatgccctgatcggtgaagaaggccaggggttagaacttggactcaaaactctacaggtaacacgtgcatattgcagtagtttctctctaggcgctggcgatacgatgctacgcatcgcaaccgagtttgcgattgaacgcgagttatataacaaaaaagtaatcagcataccgttggtacgtgagcaactcgctacagcttatgcctaccttttagcagcggaggtgttatcacttgttggtgcgcgagggttacacgtttgtatcaatcagttcagtacatggtcaccaatcgtcaaggtactggtgcctgaatatgtagagtcgcttgccaaaatcacatcctcagtgcttgggtcacgttttttcttaagaaatgcatatgcagatggaatgtttcagaaagcattcagggaccatctgattgtcagtgtgtttgacggtagtagcaccgtctgcctagacagtctgagttttcagctcaaatctgccaataaagggcgcagcaaaaaagccgaccatctcaatcaagctgaagcgaaagcacgctatcgccagttatatgacttacaggtagagacaggtgctattgatttccgtgagcttgagattttcaaccgagatggcgacttagtgatggagtcactcgaaacaatcatcgaaatgctcaacgactctaatgtcacagcagggttgtctgctgagacactcaccacgctacntgaacaagcaaaccaacttctggttgagcagcattcgttggatcaaaaaattcaggattacttctcaaattctgagcaaagcaaagagtttgaaacgctgcgcttcagtcttgcccgtaactatgccgagttattcgctcgtattactgtgttgggtttctgggtttttaaccgccatggtttaaggcctgctttacaggatggtgcatggctgatcattttcttaaatgccgctgaagggcagacagcccctccaatgacgtcattacgtgaaagcacattggcagatttgctagaccgaatttcaaccaaccatatgttatctgtcatcgattttgcactggcaccacgtgatgccaaaccggttaaagaggaaattatcccatga

SEQ ID NO: 6124 - protein, 597 aa, Acinetobacter baumannii
  misc_feature (469)..(469): Xaa can be any naturally occurring amino acid
MSLTSNLRQFQSAARLEQILGSVHDINNDFSWSAAIERDEKEQYPQRAVDFLNAVGMNRFYVPSELGGRMEIGEELLYLHRVLARRDLTINSTYSTNAWSVIVWIGGNANQCQNIANRILSGAAPALAYSEKAHGADLLSSEVTAQPSDSKYVLNGEKWSINRATLGDSLSLIAKTSNDRGPRSLSAFWLDKRHMASKGTYSLNRLPTVGMRGLDISGIGFNNAEIHKDALIGEEGQGLELGLKTLQVTRAYCSSFSLGAGDTMLRIATEFAIERELYNKKVISIPLVREQLATAYAYLLAAEVLSLVGARGLHVCINQFSTWSPIVKVLVPEYVESLAKITSSVLGSRFFLRNAYADGMFQKAFRDHLIVSVFDGSSTVCLDSLSFQLKSANKGRSKKADHLNQAEAKARYRQLYDLQVETGAIDFRELEIFNRDGDLVMESLETIIEMLNDSNVTAGLSAETLTTLXEQANQLLVEQHSLDQKIQDYFSNSEQSKEFETLRFSLARNYAELFARITVLGFWVFNRHGLRPALQDGAWLIIFLNAAEGQTAPPMTSLRESTLADLLDRISTNHMLSVIDFALAPRDAKPVKEEIIP

SEQ ID NO: 6125 - DNA, 825 bp, Acinetobacter baumannii
  misc_feature (499)..(499): n is a, c, g or t
atgaacattaaagcactcttacttataacaagcgctatttttatttcagcctgttcaccttatatagtgactgctaatccaaatcacagcgcttcaaaatctgatgaaaaagcagagaaaattaaaaatttatttaacgaagcacacactacgggtgttttagttatccaacaaggccaaactcaacaaagctatggtaatgatcttgctcgtgcttcgaccgagtatgtacctgcttcgaccttcaaaatgcttaatgctttgatcggccttgagcaccataaggcaaccaccacagaagtatttaagtgggacgggcaaaaaaggctattcccagaatgggaaaaggacatgaccctaggcgatgctatgaaagcttccgctattccggtttatcaagatttagctcgtcgtattggacttgaactcatgtctaaggaagtgaagcgtgttggttatggcaatgcagatatcggtacccaagtcgataatttttggntggtgggtcctttaaaaattactcctcagcaagaggcacagtttgcttacaagctagctaataaaacgcttccatttagccaaaaagtccaagatgaagtgcaatccatgttattcatagaagaaaagaatggaaataaaatatacgcaaaaagtggttggggatgggatgtagacccacaagtaggctggttaactggatgggttgttcagcctcaaggaaatattgtagcattctcccttaacttagaaatgaaaaaaggaatacctagctctgttcgaaaagagattacttataaaagtttagaacaattaggtattttatag

SEQ ID NO: 6126 - protein, 274 aa, Acinetobacter baumannii
  misc_feature (167)..(167): Xaa can be any naturally occurring amino acid
MNIKALLLITSAIFISACSPYIVTANPNHSASKSDEKAEKIKNLFNEAHTTGVLVIQQGQTQQSYGNDLARASTEYVPASTFKMLNALIGLEHHKATTTEVFKWDGQKRLFPEWEKDMTLGDAMKASAIPVYQDLARRIGLELMSKEVKRVGYGNADIGTQVDNFWXVGPLKITPQQEAQFAYKLANKTLPFSQKVQDEVQSMLFIEEKNGNKIYAKSGWGWDVDPQVGWLTGWVVQPQGNIVAFSLNLEMKKGIPSSVRKEITYKSLEQLGIL

SEQ ID NO: 6127 - DNA, 1179 bp, Acinetobacter baumannii
  misc_feature (1144)..(1144): n is a, c, g or t
atgaatattcgccaagtgtctgctatttgtctttcaatagcagctactcattttgtgtatgccgcttcaaatgttgtaaatcctgtaaatgattcttcccaagcaaaaggaattattaaaaatcaatatattgttatattaaataaggatgcaggtccttctaaagatttcgcacaaaatattgctaaacaacatgctggtaaagttttacaaagctacgatactgttcttaaaggttttgcaatttatttacctgatacagcaggggcagcctttattgaagcgatgaaaaagaaccctcatgttctttcagtagaaagcgatacaatagtaaatattgatgcaactactcaaagtaatccagattggggactagatcgtatagaccagaaagctttaccattaaattcgacttattcttatttacagaccggttcaggtactacggcttatatcgtggatactggtatattatctagccaccaagagttttcaggacgtgtgttaagcggttataccgcaatatctgatggcaatggtacaaccgactgtaatggacatgggacccatgttgctggaacagtaggtggtacgacctatggtgttgccaaaagtgtcaatttagttcctatccggattttggggtgtgatgggtcaggagcctcaagtaatgttattgctggtttagactggatattaaaaaatggtaaaaaacctgcagttgtaaatatgtctttagggggggcgacaagttcttctttagatagtgcagtggaaaatttatataataatggttatgtcatggtcgtagccgctggcaattcaaatacagatgcatgtacatcttctccagcaagagtaagtaaggccattacagtggctgcgacagataataccgatactcgggcaagctattctaattatggaagctgtgttgatatttttgcacctggaagtcagattaactcttcttggattggaagtaatacagctaccaagatattaaacggtacttcaatggcaaccccgcatgttgctggtgtagttgctgaaatgcttcaaagtacacctacggcttcacctcaaacgatctctaccaatcttttaaatcaagcgagcagtaacgtagtaaaaaacccttcangtagcccaaaccgcttgttatataaatctccttaa

SEQ ID NO: 6128 - protein, 392 aa, Acinetobacter baumannii
  misc_feature (382)..(382): Xaa can be any naturally occurring amino acid
MNIRQVSAICLSIAATHFVYAASNVVNPVNDSSQAKGIIKNQYIVILNKDAGPSKDFAQNIAKQHAGKVLQSYDTVLKGFAIYLPDTAGAAFIEAMKKNPHVLSVESDTIVNIDATTQSNPDWGLDRIDQKALPLNSTYSYLQTGSGTTAYIVDTGILSSHQEFSGRVLSGYTAISDGNGTTDCNGHGTHVAGTVGGTTYGVAKSVNLVPIRILGCDGSGASSNVIAGLDWILKNGKKPAVVNMSLGGATSSSLDSAVENLYNNGYVMVVAAGNSNTDACTSSPARVSKAITVAATDNTDTRASYSNYGSCVDIFAPGSQINSSWIGSNTATKILNGTSMATPHVAGVVAEMLQSTPTASPQTISTNLLNQASSNVVKNPSXSPNRLLYKSP

SEQ ID NO: 6129 - DNA, 972 bp, Acinetobacter baumannii
  misc_feature (704)..(704): n is a, c, g or t
atgaagaccaaaattacagaactatttgaaatcgagcatccaattattcaaggcggtatgcattatgttggttttgcagagcttgcggctgcggtttcaaacgcgggcgggttaggcattattactggcttaactcagcgtacgcctgaaaatttggcaaaagaaattgcacgttgccgagaaatgaccgacaagccttttggggtaaatttaacctttttgcctaccgtaaatactcctgattatccgggttttgtagaggcaattattaaaggtggcgtaaagattgtagaaacagcagggcgtaatcctgaacaagtcatgccgtatttaaaggctgctggtattaaagtaattcacaaatgtacttcggttcgacatagcttaaaagctcagcaaattggatgtgatgcagtttctgtagatggttttgagtgcggtggtcaccccggtgaagatgacgtgccaaatatgattttattgcctttagcagccgatgcattagacatcccgtttgttgcctcaggtggtatggcagatggacgttcgcttgctgctgctttagcgatgggagccgatggaattaatatgggaacgcgttttattgcgactcaggaagctcccgtacatgaaaatgtgaaacaggcgattttaaatgcaaccgaacgagatacgcgtttaattatgcgtgctttgcgaaatanagaacgtgtcatgaataatgctgctgtagaaaaaatcgtggcaaaagaaaaagcactcggcgataacattaagtttgaagatattatggaagaagttgcaggtgtttatccaaaagtcatgattgatggcgatgtaaatgcaggtgcatggtcatgtgggttagtggcaagcttaatccatgatattccgacatgcgatgaactggttaaccgaattgtcaaagaggcagaagatattattcgcggacgtttatcagggcttttataa

SEQ ID NO: 6130 - protein, 323 aa, Acinetobacter baumannii
  misc_feature (235)..(235): Xaa can be any naturally occurring amino acid
MKTKITELFEIEHPIIQGGMHYVGFAELAAAVSNAGGLGIITGLTQRTPENLAKEIARCREMTDKPFGVNLTFLPTVNTPDYPGFVEAIIKGGVKIVETAGRNPEQVMPYLKAAGIKVIHKCTSVRHSLKAQQIGCDAVSVDGFECGGHPGEDDVPNMILLPLAADALDIPFVASGGMADGRSLAAALAMGADGINMGTRFIATQEAPVHENVKQAILNATERDTRLIMRALRNXERVMNNAAVEKIVAKEKALGDNIKFEDIMEEVAGVYPKVMIDGDVNAGAWSCGLVASLIHDIPTCDELVNRIVKEAEDIIRGRLSGLL

SEQ ID NO: 6131 - DNA, 483 bp, Acinetobacter baumannii
  misc_feature (224)..(224): n is a, c, g or t
atgaaagcaaatcaggaatttttacgtcaagccattgagcttgcttataacaatatagaaaaaggtggccgaccatttggcgcagtaattgtaaaagatggcaaagtaattgcttcaggtgttaatcaaattttgacaaccaatgatccgacagcacatgctgaactattggcgattcgggcagccagccaagttctaggaaccgcgaatttagaaggctgttnggtatttgcaagcgggcatccatgtcctatgtgtatggctgcaatgcgtttagcgggtataaaaacagttaactatgcttattctaatgaagatggcgcaccgtttggtttatctacagctgaaatatatgccgatcttgtaaaaccatttgctgaacagtccatgaaaatcgaatatgtgcctgttcgatttgaagaccgtaccgatctttatgtgttttggaaaaattatcaagctaagcaatcgggcctaaagtaa

SEQ ID NO: 6132 - protein, 160 aa, Acinetobacter baumannii
  misc_feature (75)..(75): Xaa can be any naturally occurring amino acid
MKANQEFLRQAIELAYNNIEKGGRPFGAVIVKDGKVIASGVNQILTTNDPTAHAELLAIRAASQVLGTANLEGCXVFASGHPCPMCMAAMRLAGIKTVNYAYSNEDGAPFGLSTAEIYADLVKPFAEQSMKIEYVPVRFEDRTDLYVFWKNYQAKQSGLK

SEQ ID NO: 6133 - DNA, 1377 bp, Acinetobacter baumannii
  misc_feature (302)..(302): n is a, c, g or t
atggaagatatcaaaaatgtaactgctctcgaagagcagacaatcaaacgtatttcgaaccgaattatcccgtttctcattattttattcattatggcatttctagacaggaccaatattggttttgctgcgttacatatgaatgatgcacttggaattactcaaaccatttttggtctgggtgcgggtgtattttttctaggttattttattgcagaagttccaagtaatatcttgcttcatcgttttggagcgcggatctggattgcccgaatcatgattacttggggcattattgcagnactcatgggttttattcatagcggtacgcagtttattgttttacggtttttactgggtattgctgaagcaggtttctttcctggtgtgatcttttatttaaccttatggtttcctgcaaagtatcgtgcccgagtttttgcaacgttttatcttggattgccaattgctcaaattattggagcaccaatttcagttggccttatgcaatggggtaataccattggttatgaaggttggcgtttgatgtatgtgctagaagggatcccttccattattttagggttaatctgtcttaaatatttaaccaataacccgaaagaagcagagtggttaacggctgagcagcgtcaatggctcatgaatacgcttgaacgtgaagaaagagaaaaagagcaatctgccgatgctgctttaactaaaggtgaactcattaaacaagtatttaaaaatcctttggtttggattatggcggttgtttattttggtattacctctggttcaaatgcgatgttcttcttcttaccaagtgttttagagtcattccgtaacacatttggtatgcaaattagccttatccaaaatggtttacttaccgcaattccatatgcttttgcagctgttgggatggtcttatggagccgccgttctgaccgtaaacaagaacgttataaacacggtgcttgtgctgcacttatggcggcattagccattgggattgcactgattgtaaatcaaccgtgggccattattgtcggctttattcttcttgcgattggtgtatttagcgcgattaacattttctggaccattcctgggcaaactctaacaggtgtgggtgccgcagcaggaattggattaattaactcggtaggtaatttaagtggttttactggtccatatttaactggatatttatataccaccacaggcacctatacagtggcattccttgcaattgctggctttgtagcgatgggtggtttgggcttgttgttattagcaaagttaaaatcgaatagcttaaaagtagaacagcagcaacttaaagttcgaactgctacggagatgaaataa

SEQ ID NO: 6134 - protein, 458 aa, Acinetobacter baumannii
  misc_feature (101)..(101): Xaa can be any naturally occurring amino acid
MEDIKNVTALEEQTIKRISNRIIPFLIILFIMAFLDRTNIGFAALHMNDALGITQTIFGLGAGVFFLGYFIAEVPSNILLHRFGARIWIARIMITWGIIAXLMGFIHSGTQFIVLRFLLGIAEAGFFPGVIFYLTLWFPAKYRARVFATFYLGLPIAQIIGAPISVGLMQWGNTIGYEGWRLMYVLEGIPSIILGLICLKYLTNNPKEAEWLTAEQRQWLMNTLEREEREKEQSADAALTKGELIKQVFKNPLVWIMAVVYFGITSGSNAMFFFLPSVLESFRNTFGMQISLIQNGLLTAIPYAFAAVGMVLWSRRSDRKQERYKHGACAALMAALAIGIALIVNQPWAIIVGFILLAIGVFSAINIFWTIPGQTLTGVGAAAGIGLINSVGNLSGFTGPYLTGYLYTTTGTYTVAFLAIAGFVAMGGLGLLLLAKLKSNSLKVEQQQLKVRTATEMK

SEQ ID NO: 6135 - DNA, 1377 bp, Acinetobacter baumannii
  misc_feature (340)..(340): n is a, c, g or t
atggaagatatcaaaaatgtaactgctctcgaagagcagacaatcaaacgtatttcgaaccgaattatcccgtttctcattattttattcattatggcatttctagacaggaccaatattggttttgctgcgttacatatgaatgatgcacttggaattactcaaaccatttttggtctgggtgcgggtgtattttttctaggttattttattgcagaagttccaagtaatatcttgcttcatcgttttggagcgcggatctggattgcccgaatcatgattacttggggcattattgcagcactcatgggttttattcatagcggtacgcagtttattnttttacggtttttactgggtattgctgaagcaggtttctttcctggtgtgatcttttatttaaccttatggtttcctgcaaagtatcgtgcccgagtttttgcaacgttttatcttggattgccaattgctcaaattattggagcaccaatttcagttggccttatgcaatggggtaataccattggttatgaaggttggcgtttgatgtatgtgctagaagggatcccttccattattttagggttaatctgtcttaaatatttaaccaataacccgaaagaagcagagtggttaacggctgagcagcgtcaatggctcatgaatacgcttgaacgtgaagaaagagaaaaagagcaatctgccgatgctgctttaactaaaggtgaactcattaaacaagtatttaaaaatcctttggtttggattatggcggttgtttattttggtattacctctggttcaaatgcgatgttcttcttcttaccaagtgttttagagtcattccgtaacacatttggtatgcaaattagccttatccaaaatggtttacttaccgcaattccatatgcttttgcagctgttgggatggtcttatggagccgccgttctgaccgtaaacaagaacgttataaacacggtgcttgtgctgcacttatggcggcattagccattgggattgcactgattgtaaatcaaccgtgggccattattgtcggctttattcttcttgcgattggtgtatttagcgcgattaacattttctggaccattcctgggcaaactctaacaggtgtgggtgccgcagcaggaattggattaattaactcggtaggtaatttaagtggttttactggtccatatttaactggatatttatataccaccacaggcacctatacagtggcattccttgcaattgctggctttgtagcgatgggtggtttgggcttgttgttattagcaaagttaaaatcgaatagcttaaaagtagaacagcagcaacttaaagttcgaactgctacggagatgaaataa

SEQ ID NO: 6136 - protein, 458 aa, Acinetobacter baumannii
  misc_feature (114)..(114): Xaa can be any naturally occurring amino acid
MEDIKNVTALEEQTIKRISNRIIPFLIILFIMAFLDRTNIGFAALHMNDALGITQTIFGLGAGVFFLGYFIAEVPSNILLHRFGARIWIARIMITWGIIAALMGFIHSGTQFIXLRFLLGIAEAGFFPGVIFYLTLWFPAKYRARVFATFYLGLPIAQIIGAPISVGLMQWGNTIGYEGWRLMYVLEGIPSIILGLICLKYLTNNPKEAEWLTAEQRQWLMNTLEREEREKEQSADAALTKGELIKQVFKNPLVWIMAVVYFGITSGSNAMFFFLPSVLESFRNTFGMQISLIQNGLLTAIPYAFAAVGMVLWSRRSDRKQERYKHGACAALMAALAIGIALIVNQPWAIIVGFILLAIGVFSAINIFWTIPGQTLTGVGAAAGIGLINSVGNLSGFTGPYLTGYLYTTTGTYTVAFLAIAGFVAMGGLGLLLLAKLKSNSLKVEQQQLKVRTATEMK

SEQ ID NO: 6137 - DNA, 1341 bp, Acinetobacter baumannii
  misc_feature (364)..(364): n is a, c, g or t
atgaaaaatgatatatctatatcggaagtagaaaagtcaacgatccgtaaactttcttttcgtattcttcctttcctcattctttgttatttcatcgcatatattgatcgggtgaatattggtttcgccgctttaaccatgaaccaagaaattggtttaactgctactgcctttggttttggtgcgacattattttttattgcatatgtcatatttgaaattccaagtaacatggcaatggaaaagctaggtgcacgtatctggattgccagaatcatgattacttggggaattgtgggttgctgtaccgccttcattaccggcccgatttcatacgcaatttcacggtttttgcttggtgctncagaagccggttttttcccaggcgtattactgtatttaacactatggttccctaaacgatatatggctcgaattgttgccgtatttatggttgccattcctttatctaactttatcgggtcaccgttatctgccttactgttaggcttgcatggtttactaggtttaagtggatggcaagtgcttttaattcttgaagcattacctgcaatccttcttggtttgttgtgcctggtatggctgccgaataccgcgaacaatgtgaaatggttaaatcaagaagaaaaggagtggttatcaagcactttaacttttgaaaaaaatcaattgttgaactctgaaaaacaagacagtgccgaacagaaaaagagtaagttcaaattgctgattaccaataaatatttatggttctttgcaattatttatgcaggaagttcagcaaccagcaatattttatcgttatggatgcctcagattttaaaagccttccatttaactgccatgcagacaggtcttttaaatatgattccgtttggtttagctgccgctttcatgattgtttggggcgtacatgccgataaaagtggaaataagagtctcaacacagctattccgttatttgtgaccagttttggtttgcttcttactatttttacttcatctttaaccttgagcttaattttattctcactcgttttgatgggtaactatgccattaaaggtcctttctgggcattggtttctgagcgcttaccacctactttagtggctgtaggtattgcagcggtgaatacgattgcgcatattggtactgggcttatgaactctattatgggtattgtaaaagattattcgggaagcttccctatttctcttttaccgttatgtatgcttacatttacgggtgccatgattgcgttgtatttgggaagaaaaccgacattgccaaaagcgcaaaaggttcaaaagttggtttag

SEQ ID NO: 6138 - protein, 446 aa, Acinetobacter baumannii
  misc_feature (122)..(122): Xaa can be any naturally occurring amino acid
MKNDISISEVEKSTIRKLSFRILPFLILCYFIAYIDRVNIGFAALTMNQEIGLTATAFGFGATLFFIAYVIFEIPSNMAMEKLGARIWIARIMITWGIVGCCTAFITGPISYAISRFLLGAXEAGFFPGVLLYLTLWFPKRYMARIVAVFMVAIPLSNFIGSPLSALLLGLHGLLGLSGWQVLLILEALPAILLGLLCLVWLPNTANNVKWLNQEEKEWLSSTLTFEKNQLLNSEKQDSAEQKKSKFKLLITNKYLWFFAIIYAGSSATSNILSLWMPQILKAFHLTAMQTGLLNMIPFGLAAAFMIVWGVHADKSGNKSLNTAIPLFVTSFGLLLTIFTSSLTLSLILFSLVLMGNYAIKGPFWALVSERLPPTLVAVGIAAVNTIAHIGTGLMNSIMGIVKDYSGSFPISLLPLCMLTFTGAMIALYLGRKPTLPKAQKVQKLV

SEQ ID NO: 6139 - DNA, 4251 bp, Escherichia coli
  misc_feature (1802)..(1802): n is a, c, g or t
atgtcacgttataaaacagacaataaacagccacgatttcgttattcagttctggcccgctgcgtggcgtgggcaaatatctctgttcaggttctttttccactcgcagtcacctttacgccagtaatggcagcacgtgcgcagcatgcggttcagccacggttgagcacggaaaatactacggtaactgctgataataacgtggagaaaaatgtcgcgtcgcttgccgctaatgccgggacatttttaagcagtcagccagatagcgatgcgacacgtaactttattaccggaatggccaccgctaaagctaaccaggaaattcaggagtggctcgggaaatacggtactgcgcgcgtcaaactgaatgtcgataaaaatttctcgctgaaggactcttcgctggaaatgctttatccgatttatgatacaccgacaaatatgttgttcactcagggggcaatacatcgtaccgacgatcgtactcagtcaaatattggttttggctggcgtcatttttcagaaaatgactggatggcgggggtgaatacttttatcgattatgatttatcccgtagtcatacccgcattggtgttggtgcggaatactggcgtgattatttgaaactgagcgccaatggttatatccgggcttctggctggaaaaaatcgccggatgttgaggattatcaggaacgcccggcgaatggctgggatattcgtgctgagggctatttacctgcctggccgcagcttggcgcaagcctgatgtatgaacagtattatggcgatgaagtcgggctgtttggtaaagataaacgccagaaagatccacatgcgattaccgctgaagtgaattacacgccagtgcctcttctgaccctgagtgccgggcataagcagggcaagagtggtgagaatgacactcgctttggcctggaagttaattatcggattggcgaacctctggaaaaacaactcgatacagacagcattcgcgagcgtcgaatgctggcaggcagccgctatgacctggttgagcgtaataacaatatcgttcttgagtatcgcaaatctgaagtgatccgtattgctctgcctgagcgtattgaaggcaagggcggccagacggtttccctggggcttgtggtcagcaaagcaactcacggtctgaaaaatgtgcaatgggaagcgccgtctttgctggccgcaggcggaaaaattacggggcagggcaatcagtggcaagtgacgctcccggcttatcaggcaggcaaagacaattattatgcgatttcagcgattgcctacgataacaaaggcaatgcctcgaaacgtgtgcagacagaagtagttattagcggagctggtatgagcgccgatcgtacggcgttaacgcttgacggtcagagccgtattcaaatgcttgctaacggtaatgagcaaaagccgctggtgctgtctctgcgcgacgccgagggccagccagtcacgggcatgaaagatcagatcaagactgaactaaccttcaaaccggctggaaatattgtgactcgtaccctgaaggccactaaatcacaggcaaagccaacactgggtgagttcaccgaaactgaagcaggggtgtatcagtctgtctttactaccggaacgcagtcaggtgaggcaacgattactgttagcgttgatgacatgagcaaaactgtcactgcagaactgcgggccacgatgatggatgtgtcaaactccaccctgagtgctaacgagccgtcaggtgatgtggttgctgatggtcagcaagnctacacgctgacactgacagcggtggactccgagggtaatccggtgacgggagaagccagccgcctgcgacttgttccgcaagacactaatggtgtaaccgttggtgccatttcggaaataaaaccaggggtttacagcgccacggtttcttcgacccgtgccggaaacgttgttgtgcgtgccttcagcgagcagtatcagctgggcacattacaacaaacgctgaagtttgttgccgggccgcttgatgcagcacattcgtccatcacactgaatcctgataaaccggtggttggcggtacagttacggcaatctggacggcaaaagatgctaatgacaaccctgtaactggcctcaatccggatgcaccgtcattatcgggcgcagctgctgctggttctacggcatcaggctggacggataatggcgacgggacctggactgcgcagatttctctcggcactacggcgggtgaattagacgttatgccgaagctcaatgggcaggacgcggcagcaaatgcggcaaaagtaaccgtggtggctgatgcattatcttcaaaccagtcgaaagtctctgtcgcagaagatcacgtaaaagccggtgaaagcacaaccgtaacgctggtggcgaaagatgcgcatggcaacgctatcagtggtctttcgttgtcggcaagtttgacggggaccgcctctgaaggggcgaccgtttccagttggaccgaaaaaggtgacggttcctatgttgctacgttaactacaggcggaaagacgggcgagcttcgtgtcatgccgctcttcaacggccagcctgcagccaccgaagccgcgcagctgactgttattgccggagagatgtcatcagcgaactctacgcttgttgcggacaataaaactccaacggttaaaacgacgacggaactcaccttcaccgtgaaggatgcgtacgggaatccggtcaccgggctgaagccagatgcaccagtgtttagtggtgccgccagcacggggagtgagcgtccttcagcaggaaactggacagagaaaggtaatggggtctacgtgtcgaccttaacgctgggatctgccgcgggtcagttgtctgtgatgccgcgagtgaacggccaaaatgccgttgctcagccactggtgctgaatgttgcaggtgacgcatctaaggctgagattcgtgatatgacagtgaaggttaataaccaactggctaatggacagtctgctaaccagatcaccctgaccgtcgtggacagctatggtaacccgttgcaggggcaagaagttacgctgactttaccgcagggtgtgaccagcaagacggggaatacagtaacaaccaatgcggcagggaaagtggacattgagcttatgtcaacggttgcaggggaacttgagatcgaggcctcggtgaaaaactctcagaagacggtcaaggtgaaattcaaggcggatttcagtaccggtcaggcgagcctggaggtagacgccgctgctcaaaaagtggcaaacggcaaagatgcctttacgctgacggcaacggttaaggatcaatacggcaaccttcttcctggcgctgtggtcgtctttaatctgcctcggggcgtcaaaccgcttgcagacggtaatatcatggtgaacgccgacaaggagggtaaagcggaactgaaagtggtttccgtgactgccggaacctatgagatcacggcgtcagcaggaaatgaccagccttcgaatgcgcagtctgtaacgtttgtggctgataagactacggcgaccatctccagtattgaggtgattggcaaccgtgcagtggcggacggcaaaaccaaacagacgtataaagttacggtgactgatgccaataacaacctgctgaaagatagcgaagtgacgctgactgccagcccggaaaatttagttctgactcccaatgggacggcgacaacgaatgagcaagggcaggctattttcaccgccacgaccactgtcgcagcgacatatacactcacggcgaaagtggaacaggccgacggtcaggaatcgacgaaaactgccgaatctaaattcgtcgcggatgataaaaacgcggtgctcgctgcatctccagagcgtgtagattctctggtggcggacgggaagactactgcaacactgacggttactctgatgtcgggtgtcaaccccgtaggaggaaccatgtgggtcgacattgaggctccggaaggggtgacagaggcggattatcagttcctgccgtcgaaaaatgaccatttcgcgagcgggaaaatcacgcgtacatttagtaccaacaagccaggtacatacacattcacattcaactctttgacatatggagggtatgaaatgaaaccagtgactgtgacaattaacgccgttcctgcagatactgaaggcgctgaggagaaataa

SEQ ID NO: 6140 - protein, 1416 aa, Escherichia coli
  misc_feature (601)..(601): Xaa can be any naturally occurring amino acid
MSRYKTDNKQPRFRYSVLARCVAWANISVQVLFPLAVTFTPVMAARAQHAVQPRLSTENTTVTADNNVEKNVASLAANAGTFLSSQPDSDATRNFITGMATAKANQEIQEWLGKYGTARVKLNVDKNFSLKDSSLEMLYPIYDTPTNMLFTQGAIHRTDDRTQSNIGFGWRHFSENDWMAGVNTFIDYDLSRSHTRIGVGAEYWRDYLKLSANGYIRASGWKKSPDVEDYQERPANGWDIRAEGYLPAWPQLGASLMYEQYYGDEVGLFGKDKRQKDPHAITAEVNYTPVPLLTLSAGHKQGKSGENDTRFGLEVNYRIGEPLEKQLDTDSIRERRMLAGSRYDLVERNNNIVLEYRKSEVIRIALPERIEGKGGQTVSLGLVVSKATHGLKNVQWEAPSLLAAGGKITGQGNQWQVTLPAYQAGKDNYYAISAIAYDNKGNASKRVQTEVVISGAGMSADRTALTLDGQSRIQMLANGNEQKPLVLSLRDAEGQPVTGMKDQIKTELTFKPAGNIVTRTLKATKSQAKPTLGEFTETEAGVYQSVFTTGTQSGEATITVSVDDMSKTVTAELRATMMDVSNSTLSANEPSGDVVADGQQXYTLTLTAVDSEGNPVTGEASRLRLVPQDTNGVTVGAISEIKPGVYSATVSSTRAGNVVVRAFSEQYQLGTLQQTLKFVAGPLDAAHSSITLNPDKPVVGGTVTAIWTAKDANDNPVTGLNPDAPSLSGAAAAGSTASGWTDNGDGTWTAQISLGTTAGELDVMPKLNGQDAAANAAKVTVVADALSSNQSKVSVAEDHVKAGESTTVTLVAKDAHGNAISGLSLSASLTGTASEGATVSSWTEKGDGSYVATLTTGGKTGELRVMPLFNGQPAATEAAQLTVIAGEMSSANSTLVADNKTPTVKTTTELTFTVKDAYGNPVTGLKPDAPVFSGAASTGSERPSAGNWTEKGNGVYVSTLTLGSAAGQLSVMPRVNGQNAVAQPLVLNVAGDASKAEIRDMTVKVNNQLANGQSANQITLTVVDSYGNPLQGQEVTLTLPQGVTSKTGNTVTTNAAGKVDIELMSTVAGELEIEASVKNSQKTVKVKFKADFSTGQASLEVDAAAQKVANGKDAFTLTATVKDQYGNLLPGAVVVFNLPRGVKPLADGNIMVNADKEGKAELKVVSVTAGTYEITASAGNDQPSNAQSVTFVADKTTATISSIEVIGNRAVADGKTKQTYKVTVTDANNNLLKDSEVTLTASPENLVLTPNGTATTNEQGQAIFTATTTVAATYTLTAKVEQADGQESTKTAESKFVADDKNAVLAASPERVDSLVADGKTTATLTVTLMSGVNPVGGTMWVDIEAPEGVTEADYQFLPSKNDHFASGKITRTFSTNKPGTYTFTFNSLTYGGYEMKPVTVTINAVPADTEGAEEK

SEQ ID NO: 6141 - DNA, 687 bp, Escherichia coli
  misc_feature (361)..(361): n is a, c, g or t
atggataatcggagcaaatttttgaataacgttgctcaggcactggggcgcccgctgcgacttgaaccgcaagcagaagatgcgccgcttaacaactatgctaacgagcggcttacccaacagcagcgctgtgacgcgtttatccagtttgccagcgatgttatgttgacgcgctgtgaactgaccagcgaggcgaaggcggcagaagctgcaatacgtctgtgtaaagagctgggagatcagtcggtcgtgattagtggtgacacgaggctggaggaattggggattagcgaacgtttgcagcaggaatgcaatgccgttgtttgggatccggcgaaaggtattgagaacatatcacaancagagcaggctaaagtgggcgtcgtatatgctgaatatggtttaaccgaatcgggaggcgtggttcttttttccgccgccgggcgcgggcgttcattgagcctgctcccggaatcttctctttttatcctgcgtaaaagcacaatcctgccgcgtgtagcgcaactcgcagaaaaattgcatcagaaagcgcaggccggtgaacgaatgccgtcatgtattaacatcatcagtggtcccagttcaacggcggacattgagcttatcaaagtcgtcggggttcatggtccggtgaaagcggtgtatctgattattgaggattgctga

SEQ ID NO: 6142 - protein, 228 aa, Escherichia coli
  misc_feature (121)..(121): Xaa can be any naturally occurring amino acid
MDNRSKFLNNVAQALGRPLRLEPQAEDAPLNNYANERLTQQQRCDAFIQFASDVMLTRCELTSEAKAAEAAIRLCKELGDQSVVISGDTRLEELGISERLQQECNAVVWDPAKGIENISQXEQAKVGVVYAEYGLTESGGVVLFSAAGRGRSLSLLPESSLFILRKSTILPRVAQLAEKLHQKAQAGERMPSCINIISGPSSTADIELIKVVGVHGPVKAVYLIIEDC

SEQ ID NO: 6143 - DNA, 864 bp, Escherichia coli
  misc_feature (181)..(181): n is a, c, g or t
gtgtgggcgctaactgcggatgcggattttctggcgcagcgggggcaaggacaggttgaacaggtctttgccagagcggtaaatatcgtactcccggctcgccagcagttgctgacgctgctttgtgaagagtacgacaatgcgcctaacagttgtcggttggcactcactcactttaatngtctgttccggcatggtgataaggttcagtttgacgatcaaggcattacgattggtcaacatcatcatatagagatgagtcattgccagcgttggctgtccccaaccttgcaaatgaccgctctgaattttcaccttatcgcctggcaacagtggcacgacattattcatcagcacctgggggaaaatgaaaccctgtttaattatcgcggcgataatccgttttatcaggcgttaaataaagaactacatattaaacgtcgggcagttattcaggccgtaaacgataaacaaaatatcgccgtagcggtcgccagtatgatgggcttagggattggccttacgccatcagccgatgattatctgaccggactggtacttattttatttatttccggacatccggcggaaaaatacaaagaggaattttatctcggtttgcaacgcggcagaaataataccacgttattaagtgccatcacgctggaagccgcattacaacaacgctgccgggaaaatattcatcgttttattcacaacattatttatgacatccctgggaacgcaactcaggcaatagaaaaaattaaacatattggctccagttccggctgcgacatgctgtatggcatggccgatggttgtgcgctgagccaaacttacggagggaattatgtcagttaa

SEQ ID NO: 6144 - protein, 287 aa, Escherichia coli
  misc_feature (61)..(61): Xaa can be any naturally occurring amino acid
MWALTADADFLAQRGQGQVEQVFARAVNIVLPARQQLLTLLCEEYDNAPNSCRLALTHFNXLFRHGDKVQFDDQGITIGQHHHIEMSHCQRWLSPTLQMTALNFHLIAWQQWHDIIHQHLGENETLFNYRGDNPFYQALNKELHIKRRAVIQAVNDKQNIAVAVASMMGLGIGLTPSADDYLTGLVLILFISGHPAEKYKEEFYLGLQRGRNNTTLLSAITLEAALQQRCRENIHRFIHNIIYDIPGNATQAIEKIKHIGSSSGCDMLYGMADGCALSQTYGGNYVS

SEQ ID NO: 6145 - DNA, 1551 bp, Escherichia coli
  misc_feature (535)..(535): n is a, c, g or t
atgtcagttaaaatagtcattaaaccgaatacctattttgattctgtctcgctgatgtctatctccacgcgtgcaaataaactcgacggcgtcgagcaggcatttgtggcgatggcgaccgaaatgaacaaaggcgtgttgaagaatttaggactgctgacgccggagctggagcaagcgaaaaacggcgacctgatgattgtcatcaatggtaaatcgggtgtggacaacgagcagttgctggcggagattgaagaactgttcaacaccaaagcgcaaagcggctcgcacgaggcgcgttacgccactattgccagcgccaaaaagcatatcccggaaagtaacctggcagtgatttcggtcaacggtctgtttgccgctcgcgaagcgcgtcaggcgctgcaaaatgacctcaacgtgatgctgttttccgataatgtctcagttgaagatgaactggcgctcaaacagttggcccatgaaaaagggctgctgatgatggggccagactgcggcacggcgattatcaacggcncggcgctctgctttggtaacgccgtgcgtcgcggcaacatcggtattgttggcgcatctggcaccggcagccaggaattgagcgtccgtatccatgaatttggtggcggcgtttcacaactgatcggcaccggcgggcgcgacctgagcgagaaaatcggtggcctgatgatgctcgatgccatcgggatgctggaaaacgatccgcaaactgaaatcattgtgcttatctccaaaccgcctgcgcctgcggtggcccgcaaagtgctggaacgcgcacgcgcctgccgcaagccagtggtggcctgcttcctcggtcgtggcgaaacgccagtggatgagcaggggctacagtttgctcgcggcagcaaagaggcggcattgaaagcggtgatgctctccggcgtgaaacaagaacatctcgacctgcatacgcttaaccagccgttgattgcggatgtgcgggcgcgtctgcaaccgcagcagaaatacattcgtggtctgttctgcggcggtacgctgtgtgacgaaaccctgttcgcggtgatggaaaaacatggcgatgtctacagcaatatccagcccgatcctgaattccgcctgcaagatatcaaccgcagcatcaaacacaccttcctcgactttggcgatgatgacttcaccaacggcaagccgcatccaatgattgacccgaccaaccgtatcagccgcttgatcgaagaagcgcgcgatccagaagtggcggtgatcgtgatggattttgtgctcggatttggatcgcatgaagatccggtcggttccaccatcgaggcgatcaaagaagcgaaagcgatcgccgctgccgaaggacgcgagttgatcattctcgcctatgtgctgggcaccgatctcgatacgccatcattagaacaacaaagccagatgctgcttgatgccggagtgattctggcgagcagcagcaccaataccggattgctggcgcgtgaatttatctgcaaaggggaggaagcctggtga

SEQ ID NO: 6146 - protein, 516 aa, Escherichia coli
  misc_feature (179)..(179): Xaa can be any naturally occurring amino acid
MSVKIVIKPNTYFDSVSLMSISTRANKLDGVEQAFVAMATEMNKGVLKNLGLLTPELEQAKNGDLMIVINGKSGVDNEQLLAEIEELFNTKAQSGSHEARYATIASAKKHIPESNLAVISVNGLFAAREARQALQNDLNVMLFSDNVSVEDELALKQLAHEKGLLMMGPDCGTAIINGXALCFGNAVRRGNIGIVGASGTGSQELSVRIHEFGGGVSQLIGTGGRDLSEKIGGLMMLDAIGMLENDPQTEIIVLISKPPAPAVARKVLERARACRKPVVACFLGRGETPVDEQGLQFARGSKEAALKAVMLSGVKQEHLDLHTLNQPLIADVRARLQPQQKYIRGLFCGGTLCDETLFAVMEKHGDVYSNIQPDPEFRLQDINRSIKHTFLDFGDDDFTNGKPHPMIDPTNRISRLIEEARDPEVAVIVMDFVLGFGSHEDPVGSTIEAIKEAKAIAAAEGRELIILAYVLGTDLDTPSLEQQSQMLLDAGVILASSSTNTGLLAREFICKGEEAW

SEQ ID NO: 6147 - DNA, 1452 bp, Escherichia coli
  misc_feature (1383)..(1383): n is a, c, g or t
atgtcagttcaaatcaacaatattcgcccggaatttgatcgtgaaatcgttgatatcgtcgattacgtgatgaactacgaaatcagctccagagtagcctacgacaccgcacattactgcctgctcgacacgctcggctgcggtctggaagctctcgaatatccggcctgtaaaaaactgctggggccaattgtccccggcaccgtcgtacccaacggcgtgcgcgttcccggaactcagtttcagctcgaccccgtccaggcggcatttaacattggcgcgatgatccgttggctcgatttcaacgatacctggctggcagcggagtgggggcatccttccgacaacctcggcggcattctggcaacggcggactggctttcgcgcaacgcggtcgccagcggcaaagcgccgttgaccatgaaacaggtgctgaccggaatgatcaaagcccatgaaattcagggctgcatcgcgctggaaaactcctttaaccgcgttggtctcgaccacgtcctgttagtgaaagtggcttccaccgccgtggtcgccgaaatgctcggcctgacccgcgaggaaattctcaacgccgtttcgctggcgtgggtggacggtcagtcgctgcgcacctatcgccatgcgccgaacaccggcacgcgtaaatcctgggcggcgggcgatgctacttcccgcgcggtacgtctggcactgatggcgaaaaccggcgaaatgggttatccgtcagccctgactgcgcctgtgtggggcttctacgacgtctcctttaaaggcgaatcgttccgcttccagcgcccgtatggttcttacgtgatggaaaatgtgctgttcaaaatctccttcccggcggagttccactcccagacggcagttgaagcagcgatgacgctctatgaacagatgcaggcagcaggcaaaacggcggcggatatcgaaaaagtgaccattcgcacccacgaagcctgtattcgcatcatcgacaaaaaagggccgctcaataacccggctgaccgcgaccactgcattcagtacatggtggcgatcccgctgctgttcgggcgcttaacggcggcagattacgaggacaacgttgcgcaagataaacgcatcgacgccctgcgcgagaagatcaattgctttgaagatccggcgtttaccgctgactaccacgacccggaaaaacgcgccatcgccaatgccataacccttgagttcaccgacggcacgcgctttgaagaagtggtggtggagtaccccattggtcatactcgccgccgtcaggatggcattccgaaactggtcgagaaattcaaaatcaatctcgcgcgccagttcccgactcgccagcagcagcgcattctggangtttctctcgacagaactcgcctggaacagatgccggtcaatgaatatctcgacctgtacgtcatttaa

SEQ ID NO: 6148 - protein, 483 aa, Escherichia coli
  misc_feature (461)..(461): Xaa can be any naturally occurring amino acid
MSVQINNIRPEFDREIVDIVDYVMNYEISSRVAYDTAHYCLLDTLGCGLEALEYPACKKLLGPIVPGTVVPNGVRVPGTQFQLDPVQAAFNIGAMIRWLDFNDTWLAAEWGHPSDNLGGILATADWLSRNAVASGKAPLTMKQVLTGMIKAHEIQGCIALENSFNRVGLDHVLLVKVASTAVVAEMLGLTREEILNAVSLAWVDGQSLRTYRHAPNTGTRKSWAAGDATSRAVRLALMAKTGEMGYPSALTAPVWGFYDVSFKGESFRFQRPYGSYVMENVLFKISFPAEFHSQTAVEAAMTLYEQMQAAGKTAADIEKVTIRTHEACIRIIDKKGPLNNPADRDHCIQYMVAIPLLFGRLTAADYEDNVAQDKRIDALREKINCFEDPAFTADYHDPEKRAIANAITLEFTDGTRFEEVVVEYPIGHTRRRQDGIPKLVEKFKINLARQFPTRQQQRILXVSLDRTRLEQMPVNEYLDLYVI

SEQ ID NO: 6149 - DNA, 1452 bp, Escherichia coli
  misc_feature (368)..(368): n is a, c, g or t
atgtcagttcaaatcaacaatattcgcccggaatttgatcgtgaaatcgttgatatcgtcgattacgtgatgaactacgaaatcagctccagagtagcctacgacaccgcacattactgcctgctcgacacgctcggctgcggtctggaagctctcgaatatccggcctgtaaaaaactgctggggccaattgtccccggcaccgtcgtacccaacggcgtgcgcgttcccggaactcagtttcagctcgaccccgtccaggcggcatttaacattggcgcgatgatccgttggctcgatttcaacgatacctggctggcagcggagtgggggcatccttccgacaacctcggcggcattctggcaanggcggactggctttcgcgcaacgcggtcgccagcggcaaagcgccgttgaccatgaaacaggtgctgaccggaatgatcaaagcccatgaaattcagggctgcatcgcgctggaaaactcctttaaccgcgttggtctcgaccacgtcctgttagtgaaagtggcttccaccgccgtggtcgccgaaatgctcggcctgacccgcgaggaaattctcaacgccgtttcgctggcgtgggtggacggtcagtcgctgcgcacctatcgccatgcgccgaacaccggcacgcgtaaatcctgggcggcgggcgatgctacttcccgcgcggtacgtctggcactgatggcgaaaaccggcgaaatgggttatccgtcagccctgactgcgcctgtgtggggcttctacgacgtctcctttaaaggcgaatcgttccgcttccagcgcccgtatggttcttacgtgatggaaaatgtgctgttcaaaatctccttcccggcggagttccactcccagacggcagttgaagcagcgatgacgctctatgaacagatgcaggcagcaggcaaaacggcggcggatatcgaaaaagtgaccattcgcacccacgaagcctgtattcgcatcatcgacaaaaaagggccgctcaataacccggctgaccgcgaccactgcattcagtacatggtggcgatcccgctgctgttcgggcgcttaacggcggcagattacgaggacaacgttgcgcaagataaacgcatcgacgccctgcgcgagaagatcaattgctttgaagatccggcgtttaccgctgactaccacgacccggaaaaacgcgccatcgccaatgccataacccttgagttcaccgacggcacgcgctttgaagaagtggtggtggagtaccccattggtcatactcgccgccgtcaggatggcattccgaaactggtcgagaaattcaaaatcaatctcgcgcgccagttcccgactcgccagcagcagcgcattctggaggtttctctcgacagaactcgcctggaacagatgccggtcaatgaatatctcgacctgtacgtcatttaa

SEQ ID NO: 6150 - protein, 483 aa, Escherichia coli
  misc_feature (123)..(123): Xaa can be any naturally occurring amino acid
MSVQINNIRPEFDREIVDIVDYVMNYEISSRVAYDTAHYCLLDTLGCGLEALEYPACKKLLGPIVPGTVVPNGVRVPGTQFQLDPVQAAFNIGAMIRWLDFNDTWLAAEWGHPSDNLGGILAXADWLSRNAVASGKAPLTMKQVLTGMIKAHEIQGCIALENSFNRVGLDHVLLVKVASTAVVAEMLGLTREEILNAVSLAWVDGQSLRTYRHAPNTGTRKSWAAGDATSRAVRLALMAKTGEMGYPSALTAPVWGFYDVSFKGESFRFQRPYGSYVMENVLFKISFPAEFHSQTAVEAAMTLYEQMQAAGKTAADIEKVTIRTHEACIRIIDKKGPLNNPADRDHCIQYMVAIPLLFGRLTAADYEDNVAQDKRIDALREKINCFEDPAFTADYHDPEKRAIANAITLEFTDGTRFEEVVVEYPIGHTRRRQDGIPKLVEKFKINLARQFPTRQQQRILEVSLDRTRLEQMPVNEYLDLYVI

SEQ ID NO: 6151 - DNA, 1260 bp, Escherichia coli
  misc_feature (1190)..(1190): n is a, c, g or t
gtgtcgcaagataacaactttagccaggggccagtcccgcagtcggcgcggaaaggggtattggcattgacgttcgtcatgctgggattaaccttcttttccgccagtatgtggaccggcggcactctcggaaccggtcttagctatcatgatttcttcctcgcagttcttatcggtaatcttctcctcggtatttacacttcatttcttggttacattggcgcaaaaaccggcctgaccacccatcttcttgctcgcttctcgtttggtgttaaaggctcatggttgccttcactgctgctgggcggcacccaggttggctggtttggcgttggcgtggcgatgtttgctattccggtgggcaaggcaaccgggctggatattaatttgctgattgccgtctccggtttactgatgaccgtcaccgtcttctttggcatttcggcgctgacagttctttcggtgattgcggttccggctatcgcctgtcttggcggttattccgtgtggttggccgttaacggcatgggcggcctggacgcattaaaagcggtcgttcccgcacaaccgttagatttcaatgtcgcgctggcgctggttgtggggtcatttatcagtgcgggcacgctcaccgctgactttgtccggtttggtcgtaatgccaaactggcggtgctggtggcgatggtggcctttttcctcggcaactcgttgatgtttattttcggtgcagcgggcgcggcggcactggggatggcggatatctctgatgtgatgattgctcagggccttctgctgcctgcgattgtggtgctggggctgaatatctggaccaccaacgataacgcgctctatgcgtcgggtttaggtttcgccaacattaccggtatgtcgagcaaaaccctttcggtgattaacggtattatcggtacggtctgcgcattatggctgtataacaattttgtcggctggttgaccttcctttcggcagctattcctccggtgggcggcgtgatcatcgctgattatctgatgaaccgtcgccgctatgagcactttgcgaccacgcgtatgatgagtgtcaattgggtggcgattctggctgtcgcgctggggattgccgcaggccactggttaccgggaattgttccggtcaacgcagtattgggtggcgcgctgagctatctganccttaacccgattttgaatcgtaaaacgacagcagcaatgacgcatgtggaggctaacagtgtcgaataa

SEQ ID NO: 6152 - protein, 419 aa, Escherichia coli
  misc_feature (397)..(397): Xaa can be any naturally occurring amino acid
MSQDNNFSQGPVPQSARKGVLALTFVMLGLTFFSASMWTGGTLGTGLSYHDFFLAVLIGNLLLGIYTSFLGYIGAKTGLTTHLLARFSFGVKGSWLPSLLLGGTQVGWFGVGVAMFAIPVGKATGLDINLLIAVSGLLMTVTVFFGISALTVLSVIAVPAIACLGGYSVWLAVNGMGGLDALKAVVPAQPLDFNVALALVVGSFISAGTLTADFVRFGRNAKLAVLVAMVAFFLGNSLMFIFGAAGAAALGMADISDVMIAQGLLLPAIVVLGLNIWTTNDNALYASGLGFANITGMSSKTLSVINGIIGTVCALWLYNNFVGWLTFLSAAIPPVGGVIIADYLMNRRRYEHFATTRMMSVNWVAILAVALGIAAGHWLPGIVPVNAVLGGALSYLXLNPILNRKTTAAMTHVEANSVE

SEQ ID NO: 6153 - DNA, 1095 bp, Citrobacter koseri
  misc_feature (254)..(254): n is a, c, g or t
atgcaagagagacacacggaacgggactatcgtgccctgctgattgctgatacgcccattattgatgttcgcgcccccatcgagtttgagcaaggcgcaatgcccgccgctatcaacctaccgttaatgaataacgatgaacgcgccgccgttggcatctgctataaacagcaagggtcagacgcggcgctggcgctggggcataaactggtggcgggtgaaattcgtcagcagcgcatggacgcctggcgggnagcgtgcctgcaaaatccgcacggtattctctgctgcgcccgtggcggtcagcgctcacatattgtgcaacgctggttgcatgacgcggggattgattatccgctggtggaaggcggttataaggcactgcgccagaccgcgattcaggcgaccattgaactgtcacaaaaaccgatagtgctgattggcggttgtaccggctgcggcaaaacgctgttagtgcaacaacaaccgaacggtgttgatctggaagggctggcgcgccatcgcggttctgcttttggtcgcacgttacaaccacaacttagccaggcgagttttgaaaacctgctggctgccgaaatgctaaaaaccgacgcccgtcagaatttgcgcctgtgggtgctggaagatgaaagccggatgatcggttcgaatcacctgccggaatgtctgcgcgaacgaatgactcaggcggcaattgcggtggtagaagatccgtttgagatccgtcttgaacgcctgaacgaagagtatttcttgcgtatgcatcatgattttacccacgcttatggcgacgaacagggctggcaggagtattgcgaatacctgcatcacgggctttcggcgattaaacgtcggctgggactacaacgctataacgaactggctgcaaggctggatgcggcgctgacaacgcaactcaccaccggcagcaccgacggtcatctggcctggctggtgccgttacttgaagaatattacgacccgatgtatcgctatcagcttgagaaaaaagcggaaaaagttgtctttcgcggtgagtgggcggaagtggcggaatgggttaaggcgcagtga

SEQ ID NO: 6154 - protein, 364 aa, Citrobacter koseri
  misc_feature (85)..(85): Xaa can be any naturally occurring amino acid
MQERHTERDYRALLIADTPIIDVRAPIEFEQGAMPAAINLPLMNNDERAAVGICYKQQGSDAALALGHKLVAGEIRQQRMDAWRXACLQNPHGILCCARGGQRSHIVQRWLHDAGIDYPLVEGGYKALRQTAIQATIELSQKPIVLIGGCTGCGKTLLVQQQPNGVDLEGLARHRGSAFGRTLQPQLSQASFENLLAAEMLKTDARQNLRLWVLEDESRMIGSNHLPECLRERMTQAAIAVVEDPFEIRLERLNEEYFLRMHHDFTHAYGDEQGWQEYCEYLHHGLSAIKRRLGLQRYNELAARLDAALTTQLTTGSTDGHLAWLVPLLEEYYDPMYRYQLEKKAEKVVFRGEWAEVAEWVKAQ

SEQ ID NO: 6155 - DNA, 1665 bp, Escherichia coli
  misc_feature (25)..(25): n is a, c, g or t
atgtgttcaatttttggcgtattcnatatcaaaacagacgcagttgagctgcgtaagaaagcactcgagctgtcacgcctgatgcgtcatcgtggcccggactggtccggtatttatgccagcgataacgccattctcgcccacgaacgtctgtcaattgttgacgttaacgcgggggcgcaacctctctacaaccaacaaaaaactcatgtgctggcagtaaacggtgaaatctacaaccaccaggcattgcgcgctgaatatggcgatcgttaccaattccagaccgggtctgactgtgaagtgatcctcgcgctgtatcaggaaaaagggccggaatttctcgacgacttgcagggcatgtttgcctttgccctgtacgacagcgaaaaagatgcatatctgattggtcgcgaccatctggggatcatcccactgtatatgggctatgacgaacacggtcagctgtatgtggcctcagaaatgaaagccctcgtgccagtttgccgcacgattaaagagtttccggcggggagctatttgtggagtcaggacggcgaaatccgttcttattatcatcgcgactggttcgactacgatgcggtgaaagataacgtgaccgacaaaaacgagctgcgtcaggcactggaagattccgttaaaagccatctgatgtctgatgtgccttacggtgtgctgctttctggtggtctggattcctcaattatttccgctatcaccaagaaatacgccgcccgtcgcgtggaagatcaggaacgctctgaagcctggtggccgcagttgcactcctttgctgtaggtctgccgggttcaccggatctgaaagcagcccaggaagtggcaaaccatctgggcacggtgcatcacgaaattcacttcactgtacaggaaggtctggatgccatccgcgacgtgatttaccacatcgaaacctatgatgtgaccactattcgcgcttcaacaccgatgtatttaatgtcgcgtaagatcaaagcgatgggcattaaaatggtgctgtccggtgaaggttctgatgaagtgtttggcggttatctttacttccacaaagcgccgaatgccaaagaactgcatgaagagacggtgcgtaaactgctggccctgcatatgtatgactgcgcgcgtgccaacaaagcgatgtcagcctggggcgtggaagcacgcgttccgttcctcgacaaaaaattccttgatgtggcgatgcgcattaacccacaggataaaatgtgcggtaacggcaaaatggaaaaacacatcctgcgtgaatgttttgaagcgtatctgcctgcaagcgtggcctggcggcaaaaagagcagttctccgatggcgtcggttacagttggatcgacaccctgaaagaagtggcagcgcagcaggtttctgatcaacagctggaaactgcccgcttccgcttcccgtacaacacgccgacctcaaaagaagcgtatctgtaccgggagatctttgaagaattgttcccgcttccgagcgccgctgagtgcgtgccgggcggtccttccgtcgcttgttcttccgctaaagcgattgagtgggatgaagcgttcaagaaaatggacgatccgtctggtcgcgcggttggcgttcaccagtcggcatataaataa

SEQ ID NO: 6156 - protein, 554 aa, Escherichia coli
  misc_feature (9)..(9): Xaa can be any naturally occurring amino acid
MCSIFGVFXIKTDAVELRKKALELSRLMRHRGPDWSGIYASDNAILAHERLSIVDVNAGAQPLYNQQKTHVLAVNGEIYNHQALRAEYGDRYQFQTGSDCEVILALYQEKGPEFLDDLQGMFAFALYDSEKDAYLIGRDHLGIIPLYMGYDEHGQLYVASEMKALVPVCRTIKEFPAGSYLWSQDGEIRSYYHRDWFDYDAVKDNVTDKNELRQALEDSVKSHLMSDVPYGVLLSGGLDSSIISAITKKYAARRVEDQERSEAWWPQLHSFAVGLPGSPDLKAAQEVANHLGTVHHEIHFTVQEGLDAIRDVIYHIETYDVTTIRASTPMYLMSRKIKAMGIKMVLSGEGSDEVFGGYLYFHKAPNAKELHEETVRKLLALHMYDCARANKAMSAWGVEARVPFLDKKFLDVAMRINPQDKMCGNGKMEKHILRECFEAYLPASVAWRQKEQFSDGVGYSWIDTLKEVAAQQVSDQQLETARFRFPYNTPTSKEAYLYREIFEELFPLPSAAECVPGGPSVACSSAKAIEWDEAFKKMDDPSGRAVGVHQSAYK

SEQ ID NO: 6157 - DNA, 1641 bp, Escherichia coli
  misc_feature (1325)..(1325): n is a, c, g or t
atggcaatccacaatcgtgcaggccaacctgcacaacagagtgatttgattaacgtcgcccaactgacggcgcaatattatgtactgaaaccagaagcagggaatgcggagcacgcggtgaaattcggtacttccggtcaccgtggcagtgcagcgcgccacagctttaacgagccgcacattctggcgatcgctcaggcaattgctgaagaacgtgcgaaaaacggcatcactggcccttgctatgtgggtaaagatactcacgccctgtccgagcctgcgttcatttccgtactggaagtgctggcagcgaacggcgttgatgtcattgtgcaggaaaacaatggcttcactccgacacctgccatttccaatgccattctggttcacaataaaaaaggtggcccgctggcagacggtatcgtgattacaccgtcccataacccgccggaagatggtggtatcaagtacaatccgccaaatggtggcccggctgataccaacgtcactaaagtggtggaagacagagcaaacgcactgctggctgatggcctgaaaggcgtgaagcgtatctccctcgacgaagcgatggcatccggtcatgtgaaagagcaggatctggtgcagccgtttgtggaagggctggccgatatcgttgatatggcggcgattcagaaagcgggcctgacgctgggcgttgatccgctgggtggttccggtatcgaatactggaagcgcattggcgagtattacaacctcaacctgaccatcgttaacgatcaggtcgatcaaaccttccgctttatgcacctcgataaagacggtgcgatccgtatggactgctcctccgagtgtgcgatggcgggcctgctggcactgcgtgataagttcgatctggcgtttgctaacgacccggattatgaccgtcacggtatcgtcactccggcaggtttgatgaatccgaaccactacctggcggtggcgatcaactacctgttccagcatcgtccgcagtggggcaaagatgttgctgtcggtaaaacgctggtttcatctgcgatgatcgaccgtgtggtcaatgatttgggccgtaagctggtagaagtaccggtaggtttcaaatggtttgttgatggtttgttcgatggcagcttcggctttggcggcgaagagagtgcaggcgcttccttcctgcgtttcgacggcacgccgtggtccaccgataaagacggcatcattatgtgtctgctggcggcggaaatcaccgctgtcaccggtaagaacccgcaggaacactataacgaactggcaaaacgctttggtgngccgagctataaccgtttgcaggcagcagcgacttccgcacaaaaagcggcgttgtctaagctgtctccggaaatggtgagcgccagcaccctggcaggtgacccgatcaccgcgcgtctgacggcggcaccgggtaatggcgcttctatcggcggtctgaaagtgatgactgacaacggctggttcgccgcgcgtccgtcaggcacggaagacgcatataagatctactgcgaaagcttccttggtgaagaacatcgcaagcagattgagaaagaagcggttgagattgttagcgaagttctgaaaaacgcgtaa

SEQ ID NO: 6158 - protein, 546 aa, Escherichia coli
  misc_feature (442)..(442): Xaa can be any naturally occurring amino acid
MAIHNRAGQPAQQSDLINVAQLTAQYYVLKPEAGNAEHAVKFGTSGHRGSAARHSFNEPHILAIAQAIAEERAKNGITGPCYVGKDTHALSEPAFISVLEVLAANGVDVIVQENNGFTPTPAISNAILVHNKKGGPLADGIVITPSHNPPEDGGIKYNPPNGGPADTNVTKVVEDRANALLADGLKGVKRISLDEAMASGHVKEQDLVQPFVEGLADIVDMAAIQKAGLTLGVDPLGGSGIEYWKRIGEYYNLNLTIVNDQVDQTFRFMHLDKDGAIRMDCSSECAMAGLLALRDKFDLAFANDPDYDRHGIVTPAGLMNPNHYLAVAINYLFQHRPQWGKDVAVGKTLVSSAMIDRVVNDLGRKLVEVPVGFKWFVDGLFDGSFGFGGEESAGASFLRFDGTPWSTDKDGIIMCLLAAEITAVTGKNPQEHYNELAKRFGXPSYNRLQAAATSAQKAALSKLSPEMVSASTLAGDPITARLTAAPGNGASIGGLKVMTDNGWFAARPSGTEDAYKIYCESFLGEEHRKQIEKEAVEIVSEVLKNA

SEQ ID NO: 6159 - DNA, 1482 bp, Escherichia coli
  misc_feature (1345)..(1345): n is a, c, g or t
atgaataaacacgcatcacaaccgcgcgctatttactatgtcgttgcgctgcaaatctgggaatattttagcttttacggcatgcgtgccctgctgatcctctatctcaccaatcaactaaaatatagcgataatcacgcctacgagttatttagcgcctactgttcgctggtatatgtcacgccaatcctcggtggctttttggcggataaagttctcggcaatcgcatggcggtgatgctgggggcgttgttgatggcgatcggtcatgtggtgctgggtgccagtgagatccatccgtcattcctctatctgtccctggcgattatcgtctgcggctatggtctgtttaaatccaacgtcagttgcctgctcggcgagctgtatgagccaaccgatccacgtcgtgatggcggtttctcgctgatgtatgcggcgggtaacgtggggtctattatcgcacctatcgcctgtggtttcgcccaggaagagtacagttgggcgatgggctttggcctggcggcggtgggtatgatcgcgggtctggtcattttcttatgtggcaatcgtcatttcacacatacccgcggcgttaacaaaaaggtactgcgtgcgacaaactttctcctgcccaactggggatggctactggttctgctggtggcaacgcctgcgctgattaccgtgttgttctggaaagagtggtcggtatacgccttgattgtcgcgacgatcattggccttggggttctggcaaaaatttatcgcaaagcagaaaaccaaaaacagcgtaaggagctggggctgattgttaccctcaccttcttcagcatgttgttctgggcattcgcacaacaggggggtagctcgattagcctttatatcgaccgcttcgttaaccgcgatatatttggttatatcgttccgactgctatgttccagtcgattaatgccttcgcagttatgctgtgcggtgtgttcctggcgtgggtggttaaagaaagcgtcgcaggtaatcgtaccgtgcgcatctggggaaaatttgctcttggccttggcctgatgagcgccggattctgcattctgaccttaagcgcccgctggtccgcaatgtatggtcactcttctctgccactgatggtgttaggcctggcggtgatgggctttgcggaactgtttatcgacccggttgctatgtcgcagattacgcgcattgaaatccccggcgtgaccggcgtattaaccggcatttatatgctgctttccggcgcgattgcgaactatctggcgggcgtgattgccgatcagacatcgcaggcttcgtttgatgcttccggggcgatcnactactccatcaatgcatatattgaagtatttgatcaaattacctggggcgcactggcgtgtgtaggactggtactgatgatttggctgtatcaggcgcttaagttcagaaaccgcgcgctggcgctggagtcttaa

SEQ ID NO: 6160 - protein, 493 aa, Escherichia coli
  misc_feature (449)..(449): Xaa can be any naturally occurring amino acid
MNKHASQPRAIYYVVALQIWEYFSFYGMRALLILYLTNQLKYSDNHAYELFSAYCSLVYVTPILGGFLADKVLGNRMAVMLGALLMAIGHVVLGASEIHPSFLYLSLAIIVCGYGLFKSNVSCLLGELYEPTDPRRDGGFSLMYAAGNVGSIIAPIACGFAQEEYSWAMGFGLAAVGMIAGLVIFLCGNRHFTHTRGVNKKVLRATNFLLPNWGWLLVLLVATPALITVLFWKEWSVYALIVATIIGLGVLAKIYRKAENQKQRKELGLIVTLTFFSMLFWAFAQQGGSSISLYIDRFVNRDIFGYIVPTAMFQSINAFAVMLCGVFLAWVVKESVAGNRTVRIWGKFALGLGLMSAGFCILTLSARWSAMYGHSSLPLMVLGLAVMGFAELFIDPVAMSQITRIEIPGVTGVLTGIYMLLSGAIANYLAGVIADQTSQASFDASGAIXYSINAYIEVFDQITWGALACVGLVLMIWLYQALKFRNRALALES

SEQ ID NO: 6161 - DNA, 294 bp, Escherichia coli
  misc_feature (37)..(37): n is a, c, g or t
atgagtaagattatcgcaaccttgtatgcggtaatgnacaagcgccccctgcgggcgctttccttcgtgatggcacttctgttagcaggatgtatgttttgggacccatcacgtttcgccgcgaagaccagtgaactggaaatctggcatggtttactgcttatgtgggccgtctgtgctggtgtgattcacggcgtgggctttcgtccgcagaaggttctctggcaagggattttttgcccattgcttgccgatattgttctcattgtcgggctgattttcttcttcttttaa

SEQ ID NO: 6162 - protein, 97 aa, Escherichia coli
  misc_feature (13)..(13): Xaa can be any naturally occurring amino acid
MSKIIATLYAVMXKRPLRALSFVMALLLAGCMFWDPSRFAAKTSELEIWHGLLLMWAVCAGVIHGVGFRPQKVLWQGIFCPLLADIVLIVGLIFFFF

SEQ ID NO: 6163 - DNA, 1224 bp, Escherichia coli
  misc_feature (427)..(427): n is a, c, g or t
atgaaaatactggtctacggcattaactactcgccggagttaaccggcatcggcaagtacaccggcgagatggtggaatggctggcagcacaaggtcatgaggtgcgggtcattaccgcgccgccttactacccgcagtggcaggtgggcgagaactattccgcctggcggtacaaacgggaagagggggccgccacggtgtggcgctgcccgctgtacgtgccaaaacagccgagcaccctgaaacgcctgttgcatctcggcagttttgccgtcagcagtttctttcctctgatggcgcaacgacgctggaagccggatcgcattattggcgtggtgccaacgctgttttgcacgccgggaatgcgcctgctggcgaaactctctggtgcgcgtaccgtgctgcatattcaggattacgaagtgnatgccatgctggggctgggccttgccggaaaaggcaaaggcggcaaagtggcacagctggcgacggcgttcgaacgtagcggactgcataacgtcgataacgtctccacgatttcgcgttcgatgatgaataaagccatcgaaaaaggcgtggcggcggataacgtcattttcttccccaactggtcggaaatcgcccgttttcagcatgttgcagacgccgatgttgatgcccttcgtaaccagcttggcctgccggataacaaaaaaatcattctttactccggcaatattggtgaaaagcaggggctggaaaacgttattgaagctgccgaacgcctgcgcgatgaaccgctgatttttgccattgtcgggcagggcggcggcaaagcgcggcttgaaaaaatggcgcagcagcgtggactacgcaacatgcaatttttcccgctgcaatcgtatgacgctttacccgcactgctgaagatgggcgattgccatctggttgtgcaaaaacgcggcgcggcagatgccgtattgccgtcgaaactgaccaatattctggcggtaggtggtaacgcggtgattaccgcagaagcccacacagaactggggcagctttgcgaaacctttccgggcattgcggtttgcgtagagccggaatcggtcgaggcgctggtggcggggatccgtcaggcgctcctgctgcccaaacacaacacggtggcacgtgaatatgccgaacgcacgctcgataaagagaacgtgttacgtcaatttataaatgatattcggggataa

SEQ ID NO: 6164 - protein, 407 aa, Escherichia coli
  misc_feature (143)..(143): Xaa can be any naturally occurring amino acid
MKILVYGINYSPELTGIGKYTGEMVEWLAAQGHEVRVITAPPYYPQWQVGENYSAWRYKREEGAATVWRCPLYVPKQPSTLKRLLHLGSFAVSSFFPLMAQRRWKPDRIIGVVPTLFCTPGMRLLAKLSGARTVLHIQDYEVXAMLGLGLAGKGKGGKVAQLATAFERSGLHNVDNVSTISRSMMNKAIEKGVAADNVIFFPNWSEIARFQHVADADVDALRNQLGLPDNKKIILYSGNIGEKQGLENVIEAAERLRDEPLIFAIVGQGGGKARLEKMAQQRGLRNMQFFPLQSYDALPALLKMGDCHLVVQKRGAADAVLPSKLTNILAVGGNAVITAEAHTELGQLCETFPGIAVCVEPESVEALVAGIRQALLLPKHNTVAREYAERTLDKENVLRQFINDIRG

SEQ ID NO: 6165 - DNA, 966 bp, Escherichia coli
  misc_feature (296)..(296): n is a, c, g or t
atgagtaaacaacgcatttttatcgctggccatcgcgggatggtcggttccgccatcaggcggcagcttgaacagcgcggtgatgtggagctggtattacgcacccgcgatgaactgaacctgctggacagccgcgcggtgcatgatttctttgccagcgaaagcattgaccaggtctatctggcggcggcgaaagtgggcggtattgttgccaacaacacgtatccggcagatttcatctaccagaacatgatgattgagagcaatatcattcaagccgcgcatcagaacgacgngaacaaactgctgtttctcggatcgtcctgcatctacccgaaactggcaaaacagccgatggtagaaagcgagttgttgcagggcacgctggagccgaccaacgagccttatgccattgccaaaatcgccgggatcaaactgtgtgaatcttacaaccgccagtacggacgggattaccgctcagtcatgccaaccaacctgtacgggccacacgacaacttccacccgagtaattcgcatgtgatcccagcattgctgcgtcgcttccatgaggcgacggcacagaatgcgccggacgtggtggtgtggggcagcggtacgccgatgcgcgaatttctacacgttgatgatatggcggcggcgagcattcatgtcatggagctggcgcacgaagtctggcaggagaacacccggccgatgctgtcgcacattaacgtcggcacgggcgttgactgcactatccgtgagctggcgcaaaccatcgccaaagtggtgggttacaaaggtcgggttgtttttgatgccagcaaaccggatggcacgccgcgcaaactgctggatgtgacgcggctgcatcagcttggctggtatcacgaaatctcactggaagcggggcttgccagcacttaccagtggttccttgagaatcaagaccgctttcgggggtaa

SEQ ID NO: 6166 - protein, 321 aa, Escherichia coli
  misc_feature (99)..(99): Xaa can be any naturally occurring amino acid
MSKQRIFIAGHRGMVGSAIRRQLEQRGDVELVLRTRDELNLLDSRAVHDFFASESIDQVYLAAAKVGGIVANNTYPADFIYQNMMIESNIIQAAHQNDXNKLLFLGSSCIYPKLAKQPMVESELLQGTLEPTNEPYAIAKIAGIKLCESYNRQYGRDYRSVMPTNLYGPHDNFHPSNSHVIPALLRRFHEATAQNAPDVVVWGSGTPMREFLHVDDMAAASIHVMELAHEVWQENTRPMLSHINVGTGVDCTIRELAQTIAKVVGYKGRVVFDASKPDGTPRKLLDVTRLHQLGWYHEISLEAGLASTYQWFLENQDRFRG

SEQ ID NO: 6167 - DNA, 1218 bp, Escherichia coli
  misc_feature (790)..(790): n is a, c, g or t
atgaatattctgcaatttaatgtgcgactggcggaaggcggggccgcaggtgtggcgttagatctccaccagcgtgcgctgcaacaggggctggcgtcacattttgtctacggctacggcaaaggcggcaaagagagcgtcagccatcaaaactatccgcaggtcatcaaacatacgccgcggatgaccgcgatggcgaacattgcgttgtttcgtctgcttaatcgcgatctgttcggcaatttcaatgagttatatcgcaccattactcgcacaccgggcccggtggttctgcattttcatgtgctgcacagctactggttgaatcttaacagcgtggtgcgcttttgcgaaaaagtgaaaaaccataaaccggatgtcactctggtctggacactgcacgaccactggagcgttaccggacgctgcgcctttaccgacggttgcgaaggctggaaaacgggctgccagaaatgcccgaccttaaataattatccgccggtgaagattgatcgcgcacaccaactggtggcgggcaaacggcagttatttcgcgagatgctggcgctgggctgtcagtttatttctcccagccagcatgtggctgatgctttcaatagtctgtacggtccagggcgttgccggattatcaataacggtattgatatggcaaccgaagcgattctggcggatctgcctccggtgcgcgaaacccagggcaagccgaaaatcgcagtggtggcgcatgatctgcgttacgacggcaaaactaaccagcaactggtacgcnagatgatggcgctgggtgacaaaatcgaactgcatacctttggtaagttctcgccgttcaccgctggtaacgttgtcaatcacggctttgaaactgacaagcgcaagttaatgagcgtgctcaatcagatggatgcgctggtgttcagttctcgcgtcgataactacccgctgattttgtgtgaggcgttatcgattggcgtgccggtgatcgccacccatagcgatgcggcgcgggaagtgctgcaaaaatccggtggtaaaaccgtcagcgaagaagatgtgctgcaactggtgcagttaagcaaaccggaaatcgcacaggcgatatttggtaccacgctggctgaattcagccagcgcagccgcgccgcctacagtggacaacagatgctggaggagtatgtcaacttctatcagaatctgtag

SEQ ID NO: 6168 - protein, 405 aa, Escherichia coli
  misc_feature (264)..(264): Xaa can be any naturally occurring amino acid
MNILQFNVRLAEGGAAGVALDLHQRALQQGLASHFVYGYGKGGKESVSHQNYPQVIKHTPRMTAMANIALFRLLNRDLFGNFNELYRTITRTPGPVVLHFHVLHSYWLNLNSVVRFCEKVKNHKPDVTLVWTLHDHWSVTGRCAFTDGCEGWKTGCQKCPTLNNYPPVKIDRAHQLVAGKRQLFREMLALGCQFISPSQHVADAFNSLYGPGRCRIINNGIDMATEAILADLPPVRETQGKPKIAVVAHDLRYDGKTNQQLVRXMMALGDKIELHTFGKFSPFTAGNVVNHGFETDKRKLMSVLNQMDALVFSSRVDNYPLILCEALSIGVPVIATHSDAAREVLQKSGGKTVSEEDVLQLVQLSKPEIAQAIFGTTLAEFSQRSRAAYSGQQMLEEYVNFYQNL

SEQ ID NO: 6169 - DNA, 1854 bp, Escherichia coli
  misc_feature (1186)..(1186): n is a, c, g or t
atgagacgatttctgacgacgctgatgatactcctggtcgtgctggtggccgggttatctgcgttagtgttgctggtgaatccgaatgatttccgcgactatatggtcaagcaagttgctgcacgtagcggttatcaattgcagctcgacgggccactgcgttggcacgtctggccgcagcttagtatcctctccgggcgaatgtctctcaccgcccagggcgcaagccagccactggttcgcgccgacaacatgcgtctggacgtggcgcttttaccactactgagtcatcaactgagcgttaagcaggtgatgctaaaaggggcagtgatccaactgacgccgcagacggaagcagtgcgcagtgaagacgctccggttgcaccgcgcgacaataccttgccggatctgtcagacgatcgcggatggtcgtttgatatatccagtcttaagatggcggacagcgtgctggtgttccagcatgaagatgacgagcaggtgacaatccgcaatatccgcctgcaaatggaacaagatccccaacatcgtggctcatttgagttctccgggcgggttaatcgcgatcagcgcgacctcacgatatcccttaacggtacggtagatgcttctgattatccgcatgatttaacggcggctattgaacaaattaactggcagttgcagggtgccgatttaccaaaacaaggtattcaggggcaggggagtttccaggcccagtggcaggagtcacataaacgcctttcatttaaccaaattagtttgaccgccaatgacagtacgctgagcgggcaagcacaggtcacgttgacagagaaaccggaatggcagctgagactgcaattcccgcaactgaatcttgacaacctcatcccgcttaaagaaacagcgaacggtgaaaacggtgccgcgcagcaagggcagagccaatcaacgttgccgcgcccggtcatttcttcgcgtattgatgaaccggcctatcagggattgcatggctttacggctgatattttgttgcaggccagtaacgtgcgctggcgcggaatgaattttacagacgttgccacgcaaatgaccaacaagtcgggtttgctggaaattactcaactgcagggcaagcttaacggtggacaggtttcgctgccgggcacgctggacgcgacatcantaaatccgcggataaacttccagccacggctggaaaacgttgagattggtaccattctgaaggcgtttaactatccgatttcgttgaccggaaagatgtcactggctggtgatttctccggtgctgacatagatgccgacgcattccgccataactggcaaggacaggcacatgtcgaaatgaccgacacgcgcatggaagggatgaacttccagcagatgattcagcaagcggtagaacgtaatggtggtgatgtgaaggccgctgaaaacttcgataacgtaacgcgtcttgaccgctttaccaccgatttgacgttgaaggatggcgtcgtgacgttaaacgacatgcaaggtcaatcgcctgtgctggcgctgacaggggaaggcatgttgaatctggcggagcaaacctgtgacacccagtttgatattcgggtcgtgggtggctggaacggggaaagcaaactgattgatttcctgaaagaaacgccagtaccgctgcgggtttatggcaactggcagcaacttaattacagcctgcaagtggatcagttactgcgtaaacatctacaggatgaagcaaaacgccgtcttaacgactgggccgagcggaataaagattcccgcaatggcaaagatgtgaagaagttgctggagaagatgtag

SEQ ID NO: 6170 - protein, 617 aa, Escherichia coli
  misc_feature (396)..(396): Xaa can be any naturally occurring amino acid
MRRFLTTLMILLVVLVAGLSALVLLVNPNDFRDYMVKQVAARSGYQLQLDGPLRWHVWPQLSILSGRMSLTAQGASQPLVRADNMRLDVALLPLLSHQLSVKQVMLKGAVIQLTPQTEAVRSEDAPVAPRDNTLPDLSDDRGWSFDISSLKMADSVLVFQHEDDEQVTIRNIRLQMEQDPQHRGSFEFSGRVNRDQRDLTISLNGTVDASDYPHDLTAAIEQINWQLQGADLPKQGIQGQGSFQAQWQESHKRLSFNQISLTANDSTLSGQAQVTLTEKPEWQLRLQFPQLNLDNLIPLKETANGENGAAQQGQSQSTLPRPVISSRIDEPAYQGLHGFTADILLQASNVRWRGMNFTDVATQMTNKSGLLEITQLQGKLNGGQVSLPGTLDATSXNPRINFQPRLENVEIGTILKAFNYPISLTGKMSLAGDFSGADIDADAFRHNWQGQAHVEMTDTRMEGMNFQQMIQQAVERNGGDVKAAENFDNVTRLDRFTTDLTLKDGVVTLNDMQGQSPVLALTGEGMLNLAEQTCDTQFDIRVVGGWNGESKLIDFLKETPVPLRVYGNWQQLNYSLQVDQLLRKHLQDEAKRRLNDWAERNKDSRNGKDVKKLLEKM

SEQ ID NO: 6171 - DNA, 1854 bp, Citrobacter koseri
  misc_feature (1121)..(1121): n is a, c, g or t
atgagacgatttctgacgacgctgatgatactcctggtcgtgctggtggccgggttatctgcgttagtgttgctggtgaatccgaatgatttccgcgactatatggtcaagcaagttgctgcacgtagcggttatcaattgcagctcgacgggccactgcgttggcacgtctggccgcagcttagtatcctctccgggcgaatgtctctcaccgcccagggcgcaagccagccactggttcgcgccgacaacatgcgtctggacgtggcgcttttaccactactgagtcatcaactgagcgttaagcaggtgatgctaaaaggggcagtgatccaactgacgccgcagacggaagcagtgcgcagtgaagacgctccggttgcaccgcgcgacaataccttgccggatctgtcagacgatcgcggatggtcgtttgatatatccagtcttaagatggcggacagcgtgctggtgttccagcatgaagatgacgagcaggtgacaatccgcaatatccgcctgcaaatggaacaagatccccaacatcgtggctcatttgagttctccgggcgggttaatcgcgatcagcgcgacctcacgatatcccttaacggtacggtagatgcttctgattatccgcatgatttaacggcggctattgaacaaattaactggcagttgcagggtgccgatttaccaaaacaaggtattcaggggcaggggagtttccaggcccagtggcaggagtcacataaacgcctttcatttaaccaaattagtttgaccgccaatgacagtacgctgagcgggcaagcacaggtcacgttgacagagaaaccggaatggcagctgagactgcaattcccgcaactgaatcttgacaacctcatcccgcttaaagaaacagcgaacggtgaaaacggtgccgcgcagcaagggcagagccaatcaacgttgccgcgcccggtcatttcttcgcgtattgatgaaccggcctatcagggattgcatggctttacggctgatattttgttgcaggccagtaacgtgcgctggcgcggaatgaattttacagacgttgccacgcaaatgaccaacaagtcgggtttgctggaaattantcaactgcagggcaagcttaacggtggacaggtttcgctgccgggcacgctggacgcgacatcaataaatccgcggataaacttccagccacggctggaaaacgttgagattggtaccattctgaaggcgtttaactatccgatttcgttgaccggaaagatgtcactggctggtgatttctccggtgctgacatagatgccgacgcattccgccataactggcaaggacaggcacatgtcgaaatgaccgacacgcgcatggaagggatgaacttccagcagatgattcagcaagcggtagaacgtaatggtggtgatgtgaaggccgctgaaaacttcgataacgtaacgcgtcttgaccgctttaccaccgatttgacgttgaaggatggcgtcgtgacgttaaacgacatgcaaggtcaatcgcctgtgctggcgctgacaggggaaggcatgttgaatctggcggagcaaacctgtgacacccagtttgatattcgggtcgtgggtggctggaacggggaaagcaaactgattgatttcctgaaagaaacgccagtaccgctgcgggtttatggcaactggcagcaacttaattacagcctgcaagtggatcagttactgcgtaaacatctacaggatgaagcaaaacgccgtcttaacgactgggccgagcggaataaagattcccgcaatggcaaagatgtgaagaagttgctggagaagatgtag

SEQ ID NO: 6172 - protein, 617 aa, Citrobacter koseri
  misc_feature (374)..(374): Xaa can be any naturally occurring amino acid
MRRFLTTLMILLVVLVAGLSALVLLVNPNDFRDYMVKQVAARSGYQLQLDGPLRWHVWPQLSILSGRMSLTAQGASQPLVRADNMRLDVALLPLLSHQLSVKQVMLKGAVIQLTPQTEAVRSEDAPVAPRDNTLPDLSDDRGWSFDISSLKMADSVLVFQHEDDEQVTIRNIRLQMEQDPQHRGSFEFSGRVNRDQRDLTISLNGTVDASDYPHDLTAAIEQINWQLQGADLPKQGIQGQGSFQAQWQESHKRLSFNQISLTANDSTLSGQAQVTLTEKPEWQLRLQFPQLNLDNLIPLKETANGENGAAQQGQSQSTLPRPVISSRIDEPAYQGLHGFTADILLQASNVRWRGMNFTDVATQMTNKSGLLEIXQLQGKLNGGQVSLPGTLDATSINPRINFQPRLENVEIGTILKAFNYPISLTGKMSLAGDFSGADIDADAFRHNWQGQAHVEMTDTRMEGMNFQQMIQQAVERNGGDVKAAENFDNVTRLDRFTTDLTLKDGVVTLNDMQGQSPVLALTGEGMLNLAEQTCDTQFDIRVVGGWNGESKLIDFLKETPVPLRVYGNWQQLNYSLQVDQLLRKHLQDEAKRRLNDWAERNKDSRNGKDVKKLLEKM

SEQ ID NO: 6173 - DNA, 660 bp, Citrobacter koseri
  misc_feature (472)..(472): n is a, c, g or t
atgagcgaacaaatcacgtttgccaccagcgattttgccagtaacccggaaccacgttgcccctgcattttgctgctggatgtttctggttctatgaacggtagacccattaatgaacttaacgccggattggttacctttcgcgatgagctgcttgccgattcgctggccttaaaaagagtggaactcggcattgtgacgttcggcccggtgcatgtggaacaaccctttaccagcgccgctaattttttcccgcccatcctgtttgcccagggcgatacaccaatgggcgctgccattaccaaagccctggatatggttgaggagcggaaacgtgaatatcgtgccaatggtatttcctattatcgtccgtggattttcctgatcaccgatggcgcaccaaccgatgagtggcaggctgccgccaacaaagtgtttcagggggaagaagataagaagtttgccttctttnccatcggtgttcagggggcggatatgaagacgctggcccaaatcagcgtccgtcagcctttgtctctgcagggattacaattccgtgaactgtttagctggttatccagttcgctgcgttcggtttcccgctccacgccgggaacggaagttgtgctggaagcgccaaaaggctggacgtcagtgtga

SEQ ID NO: 6174 - protein, 219 aa, Citrobacter koseri
  misc_feature (158)..(158): Xaa can be any naturally occurring amino acid
MSEQITFATSDFASNPEPRCPCILLLDVSGSMNGRPINELNAGLVTFRDELLADSLALKRVELGIVTFGPVHVEQPFTSAANFFPPILFAQGDTPMGAAITKALDMVEERKREYRANGISYYRPWIFLITDGAPTDEWQAAANKVFQGEEDKKFAFFXIGVQGADMKTLAQISVRQPLSLQGLQFRELFSWLSSSLRSVSRSTPGTEVVLEAPKGWTSV

SEQ ID NO: 6175 - DNA, 1239 bp, Escherichia coli
  misc_feature (637)..(637): n is a, c, g or t
atgccgcaacaaaattatctggatgaactcactccggcttttacgcctttactggcgattaaagaagcctctcgctgtttattatgtcatgacgctccctgtagtcaggcttgcccggcacagaccgatccggggaaatttattcgctcaatctactttcgtaattttaaaggcgctgccgagacaattcgcgaaaataatgccctcggtgccgtttgtgccagagtgtgcccgacggagaaattatgccaaagcggttgtacacgtgccggtgttgatgctcccattgatatcggtcgtttacagcgttttgttactgattttgaacaacaaactgggatggaaatttatcagcccggtactaaaacgctcggcaaagtcgccattattggcgcaggtcctgccggattgcaggccagtgtgacgctgacaaaccagggttatgacgtcacgatctatgagaaagaagcacaacccggtggctggttgcgtaacggcattccgcaattccggttaccgcaatcggtgctggatgcagaaatcgcccgtatagaaaaaatgggcgtgaccattaagtgcaataacgaaatcggtaaaacactcaccctggagcagctgaaagcggaaaaccgcgcgntactggtcaccgtagggttatcgagcggttccgggttatcgctgtttgagcatagcgacgttgagattgccgtagacttcctgcaacgtgcacgacaggcgcaaggcgatatcagcattccacaaagcgcattaattatcggcggcggtgatgtcgcgatggacgtagccagcacgctgaaagttctcggctgtcaggcggtaacctgcgtagcgcgtgaagagttagatgagtttccggcaagcgaaaaagagtttgccagcgcccgggagttgggcgtttcgatcatcgatggatttacaccagtagccgtggaaggcaataaagtcacgtttaagcatgtacggttaccgggcgaactgacgatggcggcagataaaattattctcgccatcggtcagcatgccagactggatgcctttgcggagttagagccgcagcgtaacaccatcgaaacgcaacattaccagacccgcgacccgcaagtctttgcggctggcgatattgttgagggtgacaaaaccgtggtctatgcagtgaaaaccgggaaagaagccgccggggcgattcatcactatttagagggagcttgctcatgttaa

SEQ ID NO: 6176 - protein, 412 aa, Escherichia coli
  misc_feature (213)..(213): Xaa can be any naturally occurring amino acid
MPQQNYLDELTPAFTPLLAIKEASRCLLCHDAPCSQACPAQTDPGKFIRSIYFRNFKGAAETIRENNALGAVCARVCPTEKLCQSGCTRAGVDAPIDIGRLQRFVTDFEQQTGMEIYQPGTKTLGKVAIIGAGPAGLQASVTLTNQGYDVTIYEKEAQPGGWLRNGIPQFRLPQSVLDAEIARIEKMGVTIKCNNEIGKTLTLEQLKAENRAXLVTVGLSSGSGLSLFEHSDVEIAVDFLQRARQAQGDISIPQSALIIGGGDVAMDVASTLKVLGCQAVTCVAREELDEFPASEKEFASARELGVSIIDGFTPVAVEGNKVTFKHVRLPGELTMAADKIILAIGQHARLDAFAELEPQRNTIETQHYQTRDPQVFAAGDIVEGDKTVVYAVKTGKEAAGAIHHYLEGACSC

SEQ ID NO: 6177 - DNA, 2628 bp, Escherichia coli
  misc_feature (248)..(248): n is a, c, g or t
atgagcgaccttgcgagagaaattacaccggtcaacattgaggaagagctgaagagctcctatctggattatgcgatgtcggtcattgttggccgtgcgctgccagatgtccgagatggcctgaagccggtacaccgtcgcgtactttacgccatgaacgtactaggcaatgactggaacaaagcctataaaaaatctgcccgtgtcgttggtgacgtaatcggtaaataccatccccatggtgactnggcggtttattacacgatcgtccgtatggcgcagccattctcgctgcgttacatgctggtagacggtcagggtaacttcggttccatcgacggcgactctgcggcggcaatgcgttatacggaaatccgtctggcgaaaattgcccatgaactgatggccgatctcgaaaaagagacggtcgatttcgttgataactatgacggtacggaaaaaattccggacgtcatgccaaccaaaattcctaacctgctggtgaacggttcttccggtatcgccgtaggtatggcaaccaacatcccgccgcacaacctgacggaagtcatcaacggttgtctggcgtatatcgatgatgaagacatcagcattgaagggctgatggaacacatcccggggccggacttcccgacggcggcaatcattaacggtcgtcgcggtattgaagaagcttaccgtaccggtcgcggcaaggtatatatccgcgcccgtgccgaagtagaagttgacgccaaaaccggacgtgaaaccattatcgtccacgaaattccttatcaggtgaacaaagcgcgcctgatcgagaagattgcggaactggtaaaagaaaaacgcgtggaaggcatcagcgcgctgcgtgacgagtctgacaaagacggtatgcgcatcgtgattgaagtgaaacgcgatgcggtcggtgaagttgtgcttaacaacctctactcccagacccagttgcaggtttctttcggtatcaacatggtggcattgcaccatggtcagccgaagatcatgaacctgaaagacatcatcgcggcgtttgttcgtcaccgccgtgaagtagtgacccgtcgtactattttcgaactgcgtaaagctcgcgatcgtgctcatatccttgaagcattagccgtggcgctggcgaacatcgacccgatcatcgaactgatccgtcatgcgccgacgcctgcagaagcgaaaaccgcgctggttgcaaatccgtggcagctgggcaacgttgctgcgatgctggaacgtgcgggcgacgatgctgcgcgtccggaatggctggagccagagttcggcgtgcgtgatggtctgtactacctgaccgaacagcaagctcaggcgattctggatctgcgtctgcagaaactgaccggccttgagcacgaaaaactgctcgacgaatacaaagagctgctggatcagattgcggaactgttgcgtattcttggtagcgccgatcgtctgatggaagtgatccgtgaagagctggagttggttcgtgaacagttcggtgacaaacgtcgtaccgaaatcaccgctaacagcgccgacatcaacctggaagatctgatcacccaggaagatgtggtggtcacgctttctcaccagggttacgtgaagtatcagccgctttctgaatacgaagcgcagcgtcgtggcgggaaaggtaaatctgccgcacgtattaaagaagaagactttatcgaccgactgctggtggcgaacactcacgatcatattctgtgcttctccagccgtggccgcgtctattcgatgaaggtctaccagttaccagaagctactcgtggcgcacgtggtcgtccgatcgtcaatctgctgccgctggaacaggacgaacgtatcaccgcgatcctgccggtgaccgagtttgaagaaggcgtgaaagtcttcatggcgaccgctaacggtactgtgaagaaaaccgtcctcaccgagttcaaccgtctgcgtaccgccggtaaagtggcgatcaaactggttgaaggcgatgagctgatcggcgttgacctgaccagcggcgaagacgaagtaatgctgttctccgctgaaggtaaagtggtgcgctttaaagagtcttctgtccgtgcgatgggctgcaacaccaccggtgttcgtggtattcgtttaggcgaaggcgataaagtcgtctctctgatcgtgcctcgtggcgatggcgcaatcctcaccgcaacgcagaacggttatggtaaacgtaccgcagtggcggaatacccaaccaagtcgcgtgcgacgaaaggggttatctccatcaaggttaccgaacgtaacggtttagtggttggcgcggtgcaggtagatgactgcgaccagatcatgatgatcaccgatgccggtacgctggtacgtactcgcgtttcggaaatcagcatcgtaggccgtaacacccagggcgtaatccttatccgtacttcggaagatgaaaacgtggtgggtctgcaacgtgttgctgaaccggttgacgaggaagatctggataccatcgacggcagtgccgcggaaggggacgatgaaatcgctccggaagtggacgttgacgacgagccagaagaagaataa

SEQ ID NO: 6178 - protein, 875 aa, Escherichia coli
  misc_feature (83)..(83): Xaa can be any naturally occurring amino acid
MSDLAREITPVNIEEELKSSYLDYAMSVIVGRALPDVRDGLKPVHRRVLYAMNVLGNDWNKAYKKSARVVGDVIGKYHPHGDXAVYYTIVRMAQPFSLRYMLVDGQGNFGSIDGDSAAAMRYTEIRLAKIAHELMADLEKETVDFVDNYDGTEKIPDVMPTKIPNLLVNGSSGIAVGMATNIPPHNLTEVINGCLAYIDDEDISIEGLMEHIPGPDFPTAAIINGRRGIEEAYRTGRGKVYIRARAEVEVDAKTGRETIIVHEIPYQVNKARLIEKIAELVKEKRVEGISALRDESDKDGMRIVIEVKRDAVGEVVLNNLYSQTQLQVSFGINMVALHHGQPKIMNLKDIIAAFVRHRREVVTRRTIFELRKARDRAHILEALAVALANIDPIIELIRHAPTPAEAKTALVANPWQLGNVAAMLERAGDDAARPEWLEPEFGVRDGLYYLTEQQAQAILDLRLQKLTGLEHEKLLDEYKELLDQIAELLRILGSADRLMEVIREELELVREQFGDKRRTEITANSADINLEDLITQEDVVVTLSHQGYVKYQPLSEYEAQRRGGKGKSAARIKEEDFIDRLLVANTHDHILCFSSRGRVYSMKVYQLPEATRGARGRPIVNLLPLEQDERITAILPVTEFEEGVKVFMATANGTVKKTVLTEFNRLRTAGKVAIKLVEGDELIGVDLTSGEDEVMLFSAEGKVVRFKESSVRAMGCNTTGVRGIRLGEGDKVVSLIVPRGDGAILTATQNGYGKRTAVAEYPTKSRATKGVISIKVTERNGLVVGAVQVDDCDQIMMITDAGTLVRTRVSEISIVGRNTQGVILIRTSEDENVVGLQRVAEPVDEEDLDTIDGSAAEGDDEIAPEVDVDDEPEEE

SEQ ID NO: 6179 - DNA, 2628 bp, Escherichia coli
  misc_feature (259)..(259): n is a, c, g or t
atgagcgaccttgcgagagaaattacaccggtcaacattgaggaagagctgaagagctcctatctggattatgcgatgtcggtcattgttggccgtgcgctgccagatgtccgagatggcctgaagccggtacaccgtcgcgtactttacgccatgaacgtactaggcaatgactggaacaaagcctataaaaaatctgcccgtgtcgttggtgacgtaatcggtaaataccatccccatggtgactcggcggtttatnacacgatcgtccgtatggcgcagccattctcgctgcgttacatgctggtagacggtcagggtaacttcggttccatcgacggcgactctgcggcggcaatgcgttatacggaaatccgtctggcgaaaattgcccatgaactgatggccgatctcgaaaaagagacggtcgatttcgttgataactatgacggtacggaaaaaattccggacgtcatgccaaccaaaattcctaacctgctggtgaacggttcttccggtatcgccgtaggtatggcaaccaacatcccgccgcacaacctgacggaagtcatcaacggttgtctggcgtatatcgatgatgaagacatcagcattgaagggctgatggaacacatcccggggccggacttcccgacggcggcaatcattaacggtcgtcgcggtattgaagaagcttaccgtaccggtcgcggcaaggtatatatccgcgcccgtgccgaagtagaagttgacgccaaaaccggacgtgaaaccattatcgtccacgaaattccttatcaggtgaacaaagcgcgcctgatcgagaagattgcggaactggtaaaagaaaaacgcgtggaaggcatcagcgcgctgcgtgacgagtctgacaaagacggtatgcgcatcgtgattgaagtgaaacgcgatgcggtcggtgaagttgtgcttaacaacctctactcccagacccagttgcaggtttctttcggtatcaacatggtggcattgcaccatggtcagccgaagatcatgaacctgaaagacatcatcgcggcgtttgttcgtcaccgccgtgaagtagtgacccgtcgtactattttcgaactgcgtaaagctcgcgatcgtgctcatatccttgaagcattagccgtggcgctggcgaacatcgacccgatcatcgaactgatccgtcatgcgccgacgcctgcagaagcgaaaaccgcgctggttgcaaatccgtggcagctgggcaacgttgctgcgatgctggaacgtgcgggcgacgatgctgcgcgtccggaatggctggagccagagttcggcgtgcgtgatggtctgtactacctgaccgaacagcaagctcaggcgattctggatctgcgtctgcagaaactgaccggccttgagcacgaaaaactgctcgacgaatacaaagagctgctggatcagattgcggaactgttgcgtattcttggtagcgccgatcgtctgatggaagtgatccgtgaagagctggagttggttcgtgaacagttcggtgacaaacgtcgtaccgaaatcaccgctaacagcgccgacatcaacctggaagatctgatcacccaggaagatgtggtggtcacgctttctcaccagggttacgtgaagtatcagccgctttctgaatacgaagcgcagcgtcgtggcgggaaaggtaaatctgccgcacgtattaaagaagaagactttatcgaccgactgctggtggcgaacactcacgatcatattctgtgcttctccagccgtggccgcgtctattcgatgaaggtctaccagttaccagaagctactcgtggcgcacgtggtcgtccgatcgtcaatctgctgccgctggaacaggacgaacgtatcaccgcgatcctgccggtgaccgagtttgaagaaggcgtgaaagtcttcatggcgaccgctaacggtactgtgaagaaaaccgtcctcaccgagttcaaccgtctgcgtaccgccggtaaagtggcgatcaaactggttgaaggcgatgagctgatcggcgttgacctgaccagcggcgaagacgaagtaatgctgttctccgctgaaggtaaagtggtgcgctttaaagagtcttctgtccgtgcgatgggctgcaacaccaccggtgttcgtggtattcgtttaggcgaaggcgataaagtcgtctctctgatcgtgcctcgtggcgatggcgcaatcctcaccgcaacgcagaacggttatggtaaacgtaccgcagtggcggaatacccaaccaagtcgcgtgcgacgaaaggggttatctccatcaaggttaccgaacgtaacggtttagtggttggcgcggtgcaggtagatgactgcgaccagatcatgatgatcaccgatgccggtacgctggtacgtactcgcgtttcggaaatcagcatcgtaggccgtaacacccagggcgtaatccttatccgtacttcggaagatgaaaacgtggtgggtctgcaacgtgttgctgaaccggttgacgaggaagatctggataccatcgacggcagtgccgcggaaggggacgatgaaatcgctccggaagtggacgttgacgacgagccagaagaagaataa

SEQ ID NO: 6180 - protein, 875 aa, Escherichia coli
  misc_feature (87)..(87): Xaa can be any naturally occurring amino acid
MSDLAREITPVNIEEELKSSYLDYAMSVIVGRALPDVRDGLKPVHRRVLYAMNVLGNDWNKAYKKSARVVGDVIGKYHPHGDSAVYXTIVRMAQPFSLRYMLVDGQGNFGSIDGDSAAAMRYTEIRLAKIAHELMADLEKETVDFVDNYDGTEKIPDVMPTKIPNLLVNGSSGIAVGMATNIPPHNLTEVINGCLAYIDDEDISIEGLMEHIPGPDFPTAAIINGRRGIEEAYRTGRGKVYIRARAEVEVDAKTGRETIIVHEIPYQVNKARLIEKIAELVKEKRVEGISALRDESDKDGMRIVIEVKRDAVGEVVLNNLYSQTQLQVSFGINMVALHHGQPKIMNLKDIIAAFVRHRREVVTRRTIFELRKARDRAHILEALAVALANIDPIIELIRHAPTPAEAKTALVANPWQLGNVAAMLERAGDDAARPEWLEPEFGVRDGLYYLTEQQAQAILDLRLQKLTGLEHEKLLDEYKELLDQIAELLRILGSADRLMEVIREELELVREQFGDKRRTEITANSADINLEDLITQEDVVVTLSHQGYVKYQPLSEYEAQRRGGKGKSAARIKEEDFIDRLLVANTHDHILCFSSRGRVYSMKVYQLPEATRGARGRPIVNLLPLEQDERITAILPVTEFEEGVKVFMATANGTVKKTVLTEFNRLRTAGKVAIKLVEGDELIGVDLTSGEDEVMLFSAEGKVVRFKESSVRAMGCNTTGVRGIRLGEGDKVVSLIVPRGDGAILTATQNGYGKRTAVAEYPTKSRATKGVISIKVTERNGLVVGAVQVDDCDQIMMITDAGTLVRTRVSEISIVGRNTQGVILIRTSEDENVVGLQRVAEPVDEEDLDTIDGSAAEGDDEIAPEVDVDDEPEEE

SEQ ID NO: 6181 - DNA, 1260 bp, Escherichia coli
  misc_feature (908)..(908): n is a, c, g or t
atgcgctttgatactgtcattatgggcggcggcctcgccggattactctgtggcctgcaactgcaaaaacacggcctgcgctgtgccattgtcactcgtggtcaaagcgcgctgcatttctcatctggatcgctggatttgctgagccatctgccggatggtcaaccggtgacagacattcacagtggactggaatctttgcgtcagcaggcacctgcccatccttacactcttctcgggccacaacgcgtgctcgatctcgcttgccaggcgcaggcattaatcgctgaaagcggtgcgcaattgcagggcagcgtagagctggctcaccagcggattacaccgctaggcactctgcgctcaacctggctaagttcgccagaagtccctgtctggccgctgcccgcgaagaaaatatgtgtagtgggaattagcggcctgatggattttcaggcgcatcttgcggcggcttcattgcgcgaattggatcttaaagttgaaaccgctgaaattgaactgccggaactggatgtgctgcgcaataacgccaccgagttccgggcggtgaatattgcccgcttccttgataatgaagaaaactggccgttgttacttgatgcacttattccggtcgccaatacctgcgaaatgatcctgatgcccgcctgcttcggcctggccgatgacaaactgtggcattggttgaatgaaaaactaccttgttcattgatgcttttgccaacgctgccgccttccgtgctgggcattcgtctgcaaaaccagttacagcgccagtttgtgcgccagggcggcgtgtggatgccgggcgatgaagtgaaaaaagtgacctgtaaaaatggcgtagtgaatgaaatctggacgcgcaatcacgccgatatcccgctgcncccacgatttgcggtgcttgcgagcggcagtttctttagcggcggactggtggcagaacgtgacggcattcgcgagccgattctcggccttgatgtgctacaaaccgctacgcggggtgaatggtataagggcgatttttttgcgccgcagccgtggcagcagttcggtgtaaccactgatgaggcgctacgcccgtcgcaggcggggcaaaccattgagaacctgtttgccatcggttcggtgctgggcggatttgatcccatcgcccagggatgcggcggcggtgtttgtgccgtcagtgctttacatgccgctcaacagattgcccaacgcgcaggaggccaacaatga

SEQ ID NO: 6182 - protein, 419 aa, Escherichia coli
  misc_feature (303)..(303): Xaa can be any naturally occurring amino acid
MRFDTVIMGGGLAGLLCGLQLQKHGLRCAIVTRGQSALHFSSGSLDLLSHLPDGQPVTDIHSGLESLRQQAPAHPYTLLGPQRVLDLACQAQALIAESGAQLQGSVELAHQRITPLGTLRSTWLSSPEVPVWPLPAKKICVVGISGLMDFQAHLAAASLRELDLKVETAEIELPELDVLRNNATEFRAVNIARFLDNEENWPLLLDALIPVANTCEMILMPACFGLADDKLWHWLNEKLPCSLMLLPTLPPSVLGIRLQNQLQRQFVRQGGVWMPGDEVKKVTCKNGVVNEIWTRNHADIPLXPRFAVLASGSFFSGGLVAERDGIREPILGLDVLQTATRGEWYKGDFFAPQPWQQFGVTTDEALRPSQAGQTIENLFAIGSVLGGFDPIAQGCGGGVCAVSALHAAQQIAQRAGGQQ

SEQ ID NO: 6183 - DNA, 783 bp, Enterobacter hormaechei
  misc_feature (46)..(46): n is a, c, g or t
atgaagaagtcgattctcgctctgtctttgttagtcggtctctccncagcggcttccagctatgcggcgctaccggagacggtacgtatcggaaccgataccacctacgcaccgttctcatcgaaagatgctaaaggtgactttgttggctttgatatcgatctcggtaacgagatgtgcaaacggatgcaggtgaaatgtacctgggttgccagcgactttgacgcgctgatcccctcactgaaagcgaaaaaaatcgacgccattatttcgtcgctctccattaccgataaacgtcagcaggagatagccttctctgacaagctgtacgccgcagattctcgtttgattgccgccaaaggttcaccgattcagccaacgctggattcactgaaaggtaaacatgttggtgtgctgcagggatcaacccaggaagcatacgctaacgagacctggcgtagcaaaggcgtggatgtggtggcctatgccaaccaggatttagtctattccgatctggctgcaggacgtctggatgctgcgttacaagatgaagttgctgccagcgaaggtttccttaagcaacccgccggtaaagatttcgcctttgcaggcccatcagtgaaagacaaaaaatacttcggtgacggcaccggtgtagggctgcgtaaagatgatgctgaactgacggcggccttcaataaggcgcttaacgagctgcgtcaggacggcacctacgacaagatggcgaaaaagtatttcgactttaatgtctacggtgactga

SEQ ID NO: 6184 - protein, 260 aa, Enterobacter hormaechei
  misc_feature (16)..(16): Xaa can be any naturally occurring amino acid
MKKSILALSLLVGLSXAASSYAALPETVRIGTDTTYAPFSSKDAKGDFVGFDIDLGNEMCKRMQVKCTWVASDFDALIPSLKAKKIDAIISSLSITDKRQQEIAFSDKLYAADSRLIAAKGSPIQPTLDSLKGKHVGVLQGSTQEAYANETWRSKGVDVVAYANQDLVYSDLAAGRLDAALQDEVAASEGFLKQPAGKDFAFAGPSVKDKKYFGDGTGVGLRKDDAELTAAFNKALNELRQDGTYDKMAKKYFDFNVYGD

SEQ ID NO: 6185 - DNA, 1248 bp, Escherichia coli
  misc_feature (778)..(778): n is a, c, g or t
atggccattaaaaaacgcagtgcaaccgttgtgcatggcgcatccggtgcggcagcggcagttaagaatccgcaggcctctaaatccagcttctggggtgaactcccgcagcatgtgatgtcagggatttcacgcatggtgccgaccttaattatgggcggtgtgatcctcgctttcagtcagctgattgcttatagctggcttaaaattcctgctgatatcggcatcatggatgctcttaatagcgggaaattctccggtttcgacctctccttactgaaatttgcctggctgtcgcagtccttcggcggtgtgttgtttggttttgccattccgatgtttgctgcttttgtggcgaactctatcggtggcaaactggcgttcccggctggatttatcggcggcttgatgtctacccagccgacgcaactgctgaacttcgatcccagcacgatgcaatgggcgacctcttcgccggtgccgtccaccttcattggtgcgctgattatttctatcgttgccggttaccttgtgaaatggatgaaccagaaaatccagttaccggatttcctgttagcgttcaaaaccacatttttgctaccgattctttccgccatttttgtcatgctggcgatgtactacgtcatcaccccctttggtggctggatcaacggcggtatccgtaccgtgctgaccgctgcaggtgagaagggcgcgctgatgtacgcaatggggatcgccgcggcgacagcaatcgaccttggtggcccgatcaacnaagcggcaggtttcgttgccttcagctttaccactgaccacgtattaccggtcactgcacgttctatcgctatcgttattccgccgattggtctgggtctggcgaccattatcgatcgtcgcttaactggcaaacgcttgttcaacgcccagctttatccgcagggtaaaaccgcgatgttcctggcgtttatggggatcagtgagggtgcgattccgtttgcactggaaagccctatcaccgccattccgtcgtatatggtcggcgcgattgtcggctcaaccgccgctgtctggctgggcgcagtgcaatggttcccggagtccgctatctgggcgtggccgctggtcactaatctgggtgtctatatggcggggatcgcgctgggagcaatcattactgcgctgatggtggtgttcttgcgtctgatgatgttccgcaaaggtaaattgttaatcgagagcctgtaa

SEQ ID NO: 6186 - protein, 415 aa, Escherichia coli
  misc_feature (260)..(260): Xaa can be any naturally occurring amino acid
MAIKKRSATVVHGASGAAAAVKNPQASKSSFWGELPQHVMSGISRMVPTLIMGGVILAFSQLIAYSWLKIPADIGIMDALNSGKFSGFDLSLLKFAWLSQSFGGVLFGFAIPMFAAFVANSIGGKLAFPAGFIGGLMSTQPTQLLNFDPSTMQWATSSPVPSTFIGALIISIVAGYLVKWMNQKIQLPDFLLAFKTTFLLPILSAIFVMLAMYYVITPFGGWINGGIRTVLTAAGEKGALMYAMGIAAATAIDLGGPINXAAGFVAFSFTTDHVLPVTARSIAIVIPPIGLGLATIIDRRLTGKRLFNAQLYPQGKTAMFLAFMGISEGAIPFALESPITAIPSYMVGAIVGSTAAVWLGAVQWFPESAIWAWPLVTNLGVYMAGIALGAIITALMVVFLRLMMFRKGKLLIESL

SEQ ID NO: 6187 - DNA, 732 bp, Kluyvera intermedia
  misc_feature (700)..(700): n is a, c, g or t
atgaaaaaagttctgattgccgcgttaattgcaggttttagtctttccgccacagcagccgaaaccattcgttttgccaccgaagcctcctatcctccgtttgaatcgattgatgcaaacaaccagatcgttggttttgatgtcgacctggcgcaggcattgtgtaaagagattgatgcaacctgcactttctctaaccaggcgtttgacagcctgatcccaagcctgaaattccgtcgcgtagaagcagtgatggcgggcatggatatcactccggagcgtgaaaagcaggtgctgtttaccaccccgtactatgacaactctgccctgtttgtgggtcagcaaggcaaatacaccagtgttgatcagctgaaaggcaaaaaagtcggcgttcagaacgggacgacacaccagaagttcattatggataagcatccggaaatcactaccgtgccatatgacagttaccagaacgcaaaactggatctgcaaaacggtcgtatcgacagcgtatttggtgacaccgcagtggtaaccgaatggctgaaagataacccgaaactggcggcagtgggcgataaagtgaccgataaagattacttcggtactggcctcggcatcgcagtacgccagggcaacactgaactgcagcagaaactcaacactgcgctggaaaaagtgaagaaagatggcacttacnaaaccatctacaacaaatggttccagaagtaa

SEQ ID NO: 6188 - protein, 243 aa, Kluyvera intermedia
  misc_feature (234)..(234): Xaa can be any naturally occurring amino acid
MKKVLIAALIAGFSLSATAAETIRFATEASYPPFESIDANNQIVGFDVDLAQALCKEIDATCTFSNQAFDSLIPSLKFRRVEAVMAGMDITPEREKQVLFTTPYYDNSALFVGQQGKYTSVDQLKGKKVGVQNGTTHQKFIMDKHPEITTVPYDSYQNAKLDLQNGRIDSVFGDTAVVTEWLKDNPKLAAVGDKVTDKDYFGTGLGIAVRQGNTELQQKLNTALEKVKKDGTYXTIYNKWFQK

SEQ ID NO: 6189 - DNA, 600 bp, Citrobacter koseri
  misc_feature (436)..(436): n is a, c, g or t
atgaccacgctgacagcacaacagattgcctgtgtttacgcctggctggcgcagttgttctcccgtgaactggacgatgaacaactgacgcaaatcgccagtgcgcagttggctgaatggttttcgttgctgaaaagcgaaccgccgctcacagcggcggtgaatgatctggaaaacagtattgccacgctgacagtacgtgacgatgcccgtctggaactggccgctgacttttgcggcctgtttctgatgactgacaagcaggcggcgctgccgtatgcatcggcctacaaacaggacgagcaagagattaaacgcttgttagttgaggcagggatggaaaccagcggcaatttcaacgaaccggcagatcatctggcgatctatctcgaattgctcagccatctgcatttttcgctgggagaggggaccgttnctgcgcgaagaatcgacagtttgcggcaaaaaacactgacggcgctgtggcaatggttaccagagtttgctgcgcgttgtcgtcagtatgacagctttggtttttacgcggcactaagccagttattgctggtgttagtggagtgtgactaccaaaaaagataa

SEQ ID NO: 6190 - protein, 199 aa, Citrobacter koseri
  misc_feature (146)..(146): Xaa can be any naturally occurring amino acid
MTTLTAQQIACVYAWLAQLFSRELDDEQLTQIASAQLAEWFSLLKSEPPLTAAVNDLENSIATLTVRDDARLELAADFCGLFLMTDKQAALPYASAYKQDEQEIKRLLVEAGMETSGNFNEPADHLAIYLELLSHLHFSLGEGTVXARRIDSLRQKTLTALWQWLPEFAARCRQYDSFGFYAALSQLLLVLVECDYQKR

SEQ ID NO: 6191 - DNA, 1446 bp, Escherichia coli
  misc_feature (227)..(227): n is a, c, g or t
atgagtcttaacctggtaagtgaacaattgctagcggcgaacggcctgaaacatcaggacttgttcgcgatcctcggtcaactggccgaacgtcgccttgattatggcgatctctattttcagtcgagctatcacgaatcctgggttttagaagaccgcattattaaagatggttcttacaacatcgatcagggcgttggtgtgcgtgcaatcagcggtgaaaaaancggatttgcttacgctgaccaaatcagcctgctggcgctggaacaaagtgcgcaagcggcgcgcaccatcgtccgtgatagtggtgatggcaaagtacagacgctgggcgcggtagagcatagcccgttgtatacctcggtagatccgctgcaaagcatgagccgtgaagagaagctggatatcctgcgtcgcgtcgataaggttgcccgcgaagcggacaagcgcgtacaagaagtgactgccagcctcagcggcgtttatgaattaattctggttgcggccaccgacggcacgctggcggcggatgttcgtccgctggtgcgtctttccgtgagcgttctggtcgaagaagatggcaaacgcgaacgcggtgccagtggcggcggcggtcgttttggttatgagttcttccttgctgatctcgacggcgaagtccgtgcggatgcgtgggcaaaagaagcagtgcgtatggcgctggtcaatctttctgccgttgctgcaccagcgggcaccatgccggtagtacttggcgcaggttggccgggcgtgctgttgcatgaagcggtgggtcacggtctggaaggcgacttcaaccgccgtggcacttcagtatttagtggacaggtcggggagttggtggcttcagaactgtgtaccgtggttgatgatggcacgatggtcgatcgccgtggttcggtggcgattgatgacgaaggtacgccaggccagtacaacgtgctgattgagaacggcattctgaaaggctacatgcaggataaactcaacgcgcgtttgatggggatgacgccgactggcaacggtcgccgtgaatcctacgctcatctgcccatgccgcgtatgaccaacacctatatgctgccgggtaaatcgaccccgcaggaaattattgaatccgttgagtacggtatctatgcaccgaactttggtggcggccaggtggatatcacctccggcaaattcgttttctccacctcagaagcgtatcttattgaaaacggtaaagtaactaagccggtgaaaggcgcaacgttgattggttccggtatcgaaaccatgcagcagatttcgatggttggcaacgacctgaaactggataacggcgtgggtgtctgcggtaaagaagggcaaagtttgccggttggcgtgggccagccaacgctgaaagttgataacctgacagttggcggtaccgcgtaa

SEQ ID NO: 6192 - protein, 481 aa, Escherichia coli
  misc_feature (76)..(76): Xaa can be any naturally occurring amino acid
MSLNLVSEQLLAANGLKHQDLFAILGQLAERRLDYGDLYFQSSYHESWVLEDRIIKDGSYNIDQGVGVRAISGEKXGFAYADQISLLALEQSAQAARTIVRDSGDGKVQTLGAVEHSPLYTSVDPLQSMSREEKLDILRRVDKVAREADKRVQEVTASLSGVYELILVAATDGTLAADVRPLVRLSVSVLVEEDGKRERGASGGGGRFGYEFFLADLDGEVRADAWAKEAVRMALVNLSAVAAPAGTMPVVLGAGWPGVLLHEAVGHGLEGDFNRRGTSVFSGQVGELVASELCTVVDDGTMVDRRGSVAIDDEGTPGQYNVLIENGILKGYMQDKLNARLMGMTPTGNGRRESYAHLPMPRMTNTYMLPGKSTPQEIIESVEYGIYAPNFGGGQVDITSGKFVFSTSEAYLIENGKVTKPVKGATLIGSGIETMQQISMVGNDLKLDNGVGVCGKEGQSLPVGVGQPTLKVDNLTVGGTA

SEQ ID NO: 6193 - DNA, 714 bp, Citrobacter koseri
  misc_feature (172)..(172): n is a, c, g or t
gtgcaaacccttcaacaagttgaaaactatacggcgttaagtgaacgtgccagcgaatatttattggccgtgatccgtcgcaaaccggatgccgtgatttgcctggcgaccggagccacgccattactgacgtatcattatctggtagaacaaatccaccaacagcaggttnatgtcagccagctcaccttcgtgaagctcgacgaatgggtggatctgccattaacgatgcctggcacctgcgaaactttcctacaacagcatatcgtgcagccgctggggctgcgtgaagaccagctcatcagctttcgctctgaagagataaatgagacagagtgcgaacgggtaacgaacctgattgcgcgcaaaggcggtctggatttatgcgttctcggattggggaaaaacggtcatcttgggctgaacgaaccgggagaaagcctgcaaccggcctgccatatcagtcaacttgatgccggaacacagcaacatgagatgttaaaaaccgcgggccgtcccgtgactcgtgggatcaccttaggcctgaaggatattctcaatacccgcgaagttttgctactggtgactggcgaaggaaagcaggatgcgacagaacgttttctcacggctaaagtctctaccgctatcccggcttcgtttttatggctgcataaccatttcacatgcgtgattgatgaaatgtgtcgtcgttaa

SEQ ID NO: 6194 - protein, 237 aa, Citrobacter koseri
  misc_feature (58)..(58): Xaa can be any naturally occurring amino acid
MQTLQQVENYTALSERASEYLLAVIRRKPDAVICLATGATPLLTYHYLVEQIHQQQVXVSQLTFVKLDEWVDLPLTMPGTCETFLQQHIVQPLGLREDQLISFRSEEINETECERVTNLIARKGGLDLCVLGLGKNGHLGLNEPGESLQPACHISQLDAGTQQHEMLKTAGRPVTRGITLGLKDILNTREVLLLVTGEGKQDATERFLTAKVSTAIPASFLWLHNHFTCVIDEMCRR

SEQ ID NO: 6195 - DNA, 714 bp, Citrobacter koseri
  misc_feature (151)..(151): n is a, c, g or t
gtgcaaacccttcaacaagttgaaaactatacggcgttaagtgaacgtgccagcgaatatttattggccgtgatccgtcgcaaaccggatgccgtgatttgcctggcgaccggagccacgccattactgacgtatcattatctggtagaanaaatccaccaacagcaggttaatgtcagccagctcaccttcgtgaagctcgacgaatgggtggatctgccattaacgatgcctggcacctgcgaaactttcctacaacagcatatcgtgcagccgctggggctgcgtgaagaccagctcatcagctttcgctctgaagagataaatgagacagagtgcgaacgggtaacgaacctgattgcgcgcaaaggcggtctggatttatgcgttctcggattggggaaaaacggtcatcttgggctgaacgaaccgggagaaagcctgcaaccggcctgccatatcagtcaacttgatgccggaacacagcaacatgagatgttaaaaaccgcgggccgtcccgtgactcgtgggatcaccttaggcctgaaggatattctcaatacccgcgaagttttgctactggtgactggcgaaggaaagcaggatgcgacagaacgttttctcacggctaaagtctctaccgctatcccggcttcgtttttatggctgcataaccatttcacatgcgtgattgatgaaatgtgtcgtcgttaa

SEQ ID NO: 6196 - protein, 237 aa, Citrobacter koseri
  misc_feature (51)..(51): Xaa can be any naturally occurring amino acid
MQTLQQVENYTALSERASEYLLAVIRRKPDAVICLATGATPLLTYHYLVEXIHQQQVNVSQLTFVKLDEWVDLPLTMPGTCETFLQQHIVQPLGLREDQLISFRSEEINETECERVTNLIARKGGLDLCVLGLGKNGHLGLNEPGESLQPACHISQLDAGTQQHEMLKTAGRPVTRGITLGLKDILNTREVLLLVTGEGKQDATERFLTAKVSTAIPASFLWLHNHFTCVIDEMCRR

SEQ ID NO: 6197 - DNA, 702 bp, Citrobacter koseri
  misc_feature (269)..(269): n is a, c, g or t
atgattactacccgaactgccaggcagtgtggacaagcagactacggatggttgcaggcccggtatactttttcctttggacactacttcgacccgaaattgttaggctatgcctccctgcgtgtgcttaaccaggaagtgctggccccaggagccgcctttcagccgcgaacctatcccaaagtcgatattttaaatgtgattctggatggagaagcagagtatcgcgacagcgaaggcaatcatgttcaggcctgcgctggtgaggngttgctgctctctacccagccgggtgtcagctatagcgaacacaatctcagcaaagacaaaccgttaacacgaatgcagctttggctggatgcctgcccgcagcgagagaatccgctgattcaaaagctggcgcttaatatggacaagcagcaattaatcgcctcgccagagggtgcgatgggaagcctgcaattacgccaacaagtgtggctgcaccatatcgtgctcgacaaaggcgaaagtgcgaatttccagttgcatgggccacgcgcgtatttgcaatcgattcacgggaaatttcatgcgcttacgcatcatgaagagaaagcggcgctaacctgcggtgatggggcgtttattcgtgacgaggctaacattacgctggttgccgattccccactgcgcgctttgctgatagatttgcctgtctag

SEQ ID NO: 6198 - protein, 233 aa, Citrobacter koseri
  misc_feature (90)..(90): Xaa can be any naturally occurring amino acid
MITTRTARQCGQADYGWLQARYTFSFGHYFDPKLLGYASLRVLNQEVLAPGAAFQPRTYPKVDILNVILDGEAEYRDSEGNHVQACAGEXLLLSTQPGVSYSEHNLSKDKPLTRMQLWLDACPQRENPLIQKLALNMDKQQLIASPEGAMGSLQLRQQVWLHHIVLDKGESANFQLHGPRAYLQSIHGKFHALTHHEEKAALTCGDGAFIRDEANITLVADSPLRALLIDLPV

SEQ ID NO: 6199 - DNA, 1161 bp, Escherichia coli
  misc_feature (991)..(991): n is a, c, g or t
atggaaagagtcagtattaccgagcgcccggactggcgcgaaaaagcccacgaatacggtttcaattttcacaccatgtacggcgagccgtactggtgtgaagatgcttactacaagttgaccctcgcccaggttgaaaagctggaagaagtcaccgccgaactgcaccagatgtgcctgaaagtggtggaaaaagtgatcgccagcgatgagctgatgaccaaattccgcattccaaaacacacctggagttttgtgcgccagtcatggctgacgcaccagccatcgctttattcgcgtcttgatctggcatgggatggtactggcgaacctaaacttctggaaaataacgccgatacgccaacgtcactatacgaggcggcgttctttcagtggatctggctggaagatcagcttaacgccggtaacttgccggagggcagcgaccagtttaacagtttgcaagaaaagctgatcgatcgcttcgttgagctgcgtgaacagtatggcttccagttgctgcatctcacctgctgtcgcgacacggtggaagatcgcggaaccattcagtatttgcaggactgcgcgacggaagctgaaatcgctaccgagttcctctacatcgacgatatcgggttaggtgaaaaaggtcagttcacggatttacaggatcaggtgatttccaacctgttcaagctgtatccgtgggaatttatgttgcgtgagatgttctccaccaagctggaggatgcaggcgtacgctggctggaaccggcgtggaagagcattatctccaacaaagcgcttctaccgctactgtgggagatgttcccgaatcacccgaacctgctgcccgcttattttgcggaagatgatcatccgcaaatggaaaaatatgtggttaaaccgatcttctcccgtgaaggcgcaaacgtgtcgatcattgagaacggcaaaaccattgaagcagcggaaggtccgtatggcgaanaagggatgattgttcagcaattccacccgttaccgaaattcggcgacagctatatgctgattggtagctggctggtgaacgatcaacctgccggaattggcattcgtgaagaccgtgcattgatcacccaggatatgtctcggttttatccgcatatttttgttgagtaa

SEQ ID NO: 6200 - protein, 386 aa, Escherichia coli
  misc_feature (331)..(331): Xaa can be any naturally occurring amino acid
MERVSITERPDWREKAHEYGFNFHTMYGEPYWCEDAYYKLTLAQVEKLEEVTAELHQMCLKVVEKVIASDELMTKFRIPKHTWSFVRQSWLTHQPSLYSRLDLAWDGTGEPKLLENNADTPTSLYEAAFFQWIWLEDQLNAGNLPEGSDQFNSLQEKLIDRFVELREQYGFQLLHLTCCRDTVEDRGTIQYLQDCATEAEIATEFLYIDDIGLGEKGQFTDLQDQVISNLFKLYPWEFMLREMFSTKLEDAGVRWLEPAWKSIISNKALLPLLWEMFPNHPNLLPAYFAEDDHPQMEKYVVKPIFSREGANVSIIENGKTIEAAEGPYGEXGMIVQQFHPLPKFGDSYMLIGSWLVNDQPAGIGIREDRALITQDMSRFYPHIFVE

SEQ ID NO: 6201 - DNA, 1893 bp, Escherichia coli
  misc_feature (1246)..(1246): n is a, c, g or t
atgacgcaaacttataacgctgatgccattgaggtactcaccgggcttgagccggttcgccgccgtccggggatgtataccgataccactcgccctaaccatttggggcaagaagttattgataacagtgtcgatgaagcactggcgggccacgcaaaacgcgtggatgtaatcttacatgccgaccagtcgttagaagtgattgacgatgggcgcgggatgccggtagatattcacccggaagagggggtaccggcggttgaactgattctttgccgtctgcacgcgggcggtaaattctctaacaaaaattaccagttctctggcggcctgcatggcgtggggatttcggtagttaacgccctgtcgaagcgcgtagaagttaacgtacgccgcgatggtcagatctataacatcgcctttgaaaatggcgaaaaggtgcaagatttacaggttgtcggcacttgcggtaaacgcaataccggtaccagcgtgcacttctggccggatgaaaccttctttgacagcccgcgtttttctgtttcacgcctgacgcatgtgctgaaagccaaagcggtactgtgcccgggcgttgagatcacttttaaagatgagatcaacaacaccgaacagcgctggtgctatcaggacggtctgaatgattacctggcggaagcggtaaacggtttaccgacgctgccagaaaaaccgtttatcggtaatttcgctggcgatactgaagcggtggactgggcgctactgtggctgccggaaggcggtgaactgctgaccgaaagctacgtcaacctgatcccaacgatgcagggcggtacccatgttaatggcctgcgtcagggcctgctggacgcgatgcgtgagttctgtgaataccgcaacattctgccgcgtggtgtaaagctgtcggcggaagatatctgggatcgctgcgcctatgtgctgtcagtaaaaatgcaggatccgcagtttgccgggcagaccaaagaacgtctctcttcgcgtcagtgtgcggcattcgtttcgggcgtggtgaaagatgccttcatcctgtggctgaaccagaacgttcaggcggcggagctgttggcagagatggcgatttccagcgcccagcgtcgtatgcgtgcggctaaaaaagtggtgcgtaaaaagctaaccagcggcccggcgctgcctggtaaattggctgactgtaccgcgcaggatcttaaccgtaccgaactattcnttgtggaaggtgactccgcaggcggatctgccaagcaggcgcgcgatcgcgaatatcaggcgatcatgccactgaaaggtaagatccttaacacctgggaagtctcttccgacgaagtgctggcttcgcaggaagtgcacgatatttcggtagctatcggtatcgatcctgacagcgacgatttgagccagcttcgttacggcaagatctgtatcctggcggatgctgactccgatggtctgcacattgccacgctgctctgcgctttgtttgtaaaacacttccgcgcattggtgaaacacggtcacgtttacgttgcactgccaccgctctaccgtattgacctcgggaaagaggtttattacgcgctgacggaagaagagaaagagggcgtacttgagcaattaaaacgcaagaaaggcaagccaaacgttcagcgttttaaaggtctcggggaaatgaacccgatgcaattgcgcgaaaccacgcttgatccgaacactcgccgtctggtgcagttgactatcgatgatgaagacgatcagcgtactgacgcgatgatggatatgctgctggcgaagaaacgctcggaagatcgccgcaactggttgcaagagaaaggcgacatggcagagattgaggtctga

SEQ ID NO: 6202 - protein, 630 aa, Escherichia coli
  misc_feature (416)..(416): Xaa can be any naturally occurring amino acid
MTQTYNADAIEVLTGLEPVRRRPGMYTDTTRPNHLGQEVIDNSVDEALAGHAKRVDVILHADQSLEVIDDGRGMPVDIHPEEGVPAVELILCRLHAGGKFSNKNYQFSGGLHGVGISVVNALSKRVEVNVRRDGQIYNIAFENGEKVQDLQVVGTCGKRNTGTSVHFWPDETFFDSPRFSVSRLTHVLKAKAVLCPGVEITFKDEINNTEQRWCYQDGLNDYLAEAVNGLPTLPEKPFIGNFAGDTEAVDWALLWLPEGGELLTESYVNLIPTMQGGTHVNGLRQGLLDAMREFCEYRNILPRGVKLSAEDIWDRCAYVLSVKMQDPQFAGQTKERLSSRQCAAFVSGVVKDAFILWLNQNVQAAELLAEMAISSAQRRMRAAKKVVRKKLTSGPALPGKLADCTAQDLNRTELFXVEGDSAGGSAKQARDREYQAIMPLKGKILNTWEVSSDEVLASQEVHDISVAIGIDPDSDDLSQLRYGKICILADADSDGLHIATLLCALFVKHFRALVKHGHVYVALPPLYRIDLGKEVYYALTEEEKEGVLEQLKRKKGKPNVQRFKGLGEMNPMQLRETTLDPNTRRLVQLTIDDEDDQRTDAMMDMLLAKKRSEDRRNWLQEKGDMAEIEV

SEQ ID NO: 6203 - DNA, 1893 bp, Escherichia coli
  misc_feature (1372)..(1372): n is a, c, g or t
atgacgcaaacttataacgctgatgccattgaggtactcaccgggcttgagccggttcgccgccgtccggggatgtataccgataccactcgccctaaccatttggggcaagaagttattgataacagtgtcgatgaagcactggcgggccacgcaaaacgcgtggatgtaatcttacatgccgaccagtcgttagaagtgattgacgatgggcgcgggatgccggtagatattcacccggaagagggggtaccggcggttgaactgattctttgccgtctgcacgcgggcggtaaattctctaacaaaaattaccagttctctggcggcctgcatggcgtggggatttcggtagttaacgccctgtcgaagcgcgtagaagttaacgtacgccgcgatggtcagatctataacatcgcctttgaaaatggcgaaaaggtgcaagatttacaggttgtcggcacttgcggtaaacgcaataccggtaccagcgtgcacttctggccggatgaaaccttctttgacagcccgcgtttttctgtttcacgcctgacgcatgtgctgaaagccaaagcggtactgtgcccgggcgttgagatcacttttaaagatgagatcaacaacaccgaacagcgctggtgctatcaggacggtctgaatgattacctggcggaagcggtaaacggtttaccgacgctgccagaaaaaccgtttatcggtaatttcgctggcgatactgaagcggtggactgggcgctactgtggctgccggaaggcggtgaactgctgaccgaaagctacgtcaacctgatcccaacgatgcagggcggtacccatgttaatggcctgcgtcagggcctgctggacgcgatgcgtgagttctgtgaataccgcaacattctgccgcgtggtgtaaagctgtcggcggaagatatctgggatcgctgcgcctatgtgctgtcagtaaaaatgcaggatccgcagtttgccgggcagaccaaagaacgtctctcttcgcgtcagtgtgcggcattcgtttcgggcgtggtgaaagatgccttcatcctgtggctgaaccagaacgttcaggcggcggagctgttggcagagatggcgatttccagcgcccagcgtcgtatgcgtgcggctaaaaaagtggtgcgtaaaaagctaaccagcggcccggcgctgcctggtaaattggctgactgtaccgcgcaggatcttaaccgtaccgaactattccttgtggaaggtgactccgcaggcggatctgccaagcaggcgcgcgatcgcgaatatcaggcgatcatgccactgaaaggtaagatccttaacacctgggaagtctcttccgacgaagtgctggctncgcaggaagtgcacgatatttcggtagctatcggtatcgatcctgacagcgacgatttgagccagcttcgttacggcaagatctgtatcctggcggatgctgactccgatggtctgcacattgccacgctgctctgcgctttgtttgtaaaacacttccgcgcattggtgaaacacggtcacgtttacgttgcactgccaccgctctaccgtattgacctcgggaaagaggtttattacgcgctgacggaagaagagaaagagggcgtacttgagcaattaaaacgcaagaaaggcaagccaaacgttcagcgttttaaaggtctcggggaaatgaacccgatgcaattgcgcgaaaccacgcttgatccgaacactcgccgtctggtgcagttgactatcgatgatgaagacgatcagcgtactgacgcgatgatggatatgctgctggcgaagaaacgctcggaagatcgccgcaactggttgcaagagaaaggcgacatggcagagattgaggtctga

SEQ ID NO: 6204 - protein, 630 aa, Escherichia coli
  misc_feature (458)..(458): Xaa can be any naturally occurring amino acid
MTQTYNADAIEVLTGLEPVRRRPGMYTDTTRPNHLGQEVIDNSVDEALAGHAKRVDVILHADQSLEVIDDGRGMPVDIHPEEGVPAVELILCRLHAGGKFSNKNYQFSGGLHGVGISVVNALSKRVEVNVRRDGQIYNIAFENGEKVQDLQVVGTCGKRNTGTSVHFWPDETFFDSPRFSVSRLTHVLKAKAVLCPGVEITFKDEINNTEQRWCYQDGLNDYLAEAVNGLPTLPEKPFIGNFAGDTEAVDWALLWLPEGGELLTESYVNLIPTMQGGTHVNGLRQGLLDAMREFCEYRNILPRGVKLSAEDIWDRCAYVLSVKMQDPQFAGQTKERLSSRQCAAFVSGVVKDAFILWLNQNVQAAELLAEMAISSAQRRMRAAKKVVRKKLTSGPALPGKLADCTAQDLNRTELFLVEGDSAGGSAKQARDREYQAIMPLKGKILNTWEVSSDEVLAXQEVHDISVAIGIDPDSDDLSQLRYGKICILADADSDGLHIATLLCALFVKHFRALVKHGHVYVALPPLYRIDLGKEVYYALTEEEKEGVLEQLKRKKGKPNVQRFKGLGEMNPMQLRETTLDPNTRRLVQLTIDDEDDQRTDAMMDMLLAKKRSEDRRNWLQEKGDMAEIEV

SEQ ID NO: 6205 - DNA, 2259 bp, Escherichia coli
  misc_feature (239)..(239): n is a, c, g or t
atgagcgatatggcagagcgccttgcgctacatgaatttacggaaaacgcctacttaaactactccatgtacgtgatcatggaccgtgcgttgccgtttattggtgatggtctgaaacctgttcagcggcgcattgtgtatgcgatgtctgagctgggcctgaatgccagcgccaaatttaaaaaatcggcccgtaccgtcggtgacgtactgggtaaataccatccgcacggcgatantgcctgttatgaagcgatggtcctgatggcgcagccgttctcttaccgttatccgctggttgatggtcaggggaactggggtgcgccggacgatccgaaatcgttcgcggcaatgcgttacaccgaatcccggttgtcgaaatattccgagctgctattgagcgagctggggcaggggacggctgactgggtcccaaacttcgacggcactttgcaggagccgaaaatgctacctgcccgtctgccaaacattttgcttaacggcaccaccggtattgccgtcggcatggcgaccgatattccaccgcataacctgcgtgaagtggctcaggcggcaatcgcattaatcgaccagccgaaaaccacgctcgatcagctgctggatatcgtgcaggggccggattatccgactgaagcggaaattatcacttcgcgcgccgagattcgtaaaatctacgagaacggacgtggttcagtgcgtatgcgcgcggtttggaagaaagaagatggcgcggtggttatctgcgcattgccgcatcaggtttcaggtgcgcgcgtactggagcaaattgctgcgcaaatgcgcaacaaaaagctgccgatggttgacgatctgcgcgatgaatctgaccacgagaacccgacccgtctggtgattgtgccgcgctccaaccgcgtggatatggatcaggtgatgaaccacctctttgctaccaccgatctggaaaagagctatcgcattaacctcaatatgatcggtctggatggtcgtccggcggtgaaaaacctgctggaaatcctctccgaatggctggtgttccgccgcgataccgtgcgccgccgactgaactatcgtctggagaaagtcctcaagcgcttgcatatcctcgaaggtttgctggtggcgtttctcaatatcgacgaagtgattgagatcattcgtaatgaagatgaaccgaaaccggcgctgatgtcgcggtttggccttacggaaacccaggcggaagcgatcctcgaactgaaactgcgtcatcttgccaaactggaagagatgaagattcgcggtgagcagagtgagctggaaaaagagcgcgaccagttgcagggcattttggcttccgagcgtaaaatgaataacctgctgaagaaagaactgcaggcagacgcgcaagcctacggtgacgaacgtcgttcgccgttgcaggaacgcgaagaagcgaaagcgatgagcgagcacgacatgctgccgtctgaacctgtcaccattgtgctgtcgcagatgggctgggtacgcagcgctaaaggccatgatatcgacgcgccgggcctgaattataaagcgggcgatagcttcaaagcggcggtgaaaggtaagagcaaccaaccggtagtgtttgttgattccaccggtcgtagctatgccatcgacccgattacgctgccgtcggcgcgtggtcagggcgagccgctcaccggcaaattaacgttgccccctggagcgaccgttgaccatatgctgatggaaagcgacgatcagaaactgctgatggcttccgatgcgggttacggtttcgtctgcacctttaacgatctggtggcgcgtaaccgtgcaggtaaggctttgatcaccttaccggaaaatgcccatgttatgccgccggtggtgattgaagatgcttccgatatgctgctggcaatcactcaggcaggccgtatgttgatgttcccggtaagcgatctgccgcagctgtcgaagggcaaaggcaacaagattatcaacattccatcggcagaagccgcgcgtggcgaggatggcctggcgcaactgtacgttctgccgccgcaaagcacgctgaccattcatgttgggaaacgcaaaattaaactgcgtccggaagagctacagaaagtcgctggcgaacgtggacgccgcggtacgttgatgcgcggtttgcagcgtatcgatcgtgttgagatcgactctcctcgccgtgccagcagcggtgatagcgaagagtaa

SEQ ID NO: 6206 - protein, 752 aa, Escherichia coli
  misc_feature (80)..(80): Xaa can be any naturally occurring amino acid
MSDMAERLALHEFTENAYLNYSMYVIMDRALPFIGDGLKPVQRRIVYAMSELGLNASAKFKKSARTVGDVLGKYHPHGDXACYEAMVLMAQPFSYRYPLVDGQGNWGAPDDPKSFAAMRYTESRLSKYSELLLSELGQGTADWVPNFDGTLQEPKMLPARLPNILLNGTTGIAVGMATDIPPHNLREVAQAAIALIDQPKTTLDQLLDIVQGPDYPTEAEIITSRAEIRKIYENGRGSVRMRAVWKKEDGAVVICALPHQVSGARVLEQIAAQMRNKKLPMVDDLRDESDHENPTRLVIVPRSNRVDMDQVMNHLFATTDLEKSYRINLNMIGLDGRPAVKNLLEILSEWLVFRRDTVRRRLNYRLEKVLKRLHILEGLLVAFLNIDEVIEIIRNEDEPKPALMSRFGLTETQAEAILELKLRHLAKLEEMKIRGEQSELEKERDQLQGILASERKMNNLLKKELQADAQAYGDERRSPLQEREEAKAMSEHDMLPSEPVTIVLSQMGWVRSAKGHDIDAPGLNYKAGDSFKAAVKGKSNQPVVFVDSTGRSYAIDPITLPSARGQGEPLTGKLTLPPGATVDHMLMESDDQKLLMASDAGYGFVCTFNDLVARNRAGKALITLPENAHVMPPVVIEDASDMLLAITQAGRMLMFPVSDLPQLSKGKGNKIINIPSAEAARGEDGLAQLYVLPPQSTLTIHVGKRKIKLRPEELQKVAGERGRRGTLMRGLQRIDRVEIDSPRRASSGDSEE

SEQ ID NO: 6207 - DNA, 1500 bp, Escherichia coli
  misc_feature (937)..(937): n is a, c, g or t
atgctaaatttatttgttggccttgatatatatacggggcttttgttattacttgctctggcatttgtgttgttctatgaagcaatcaatggttttcatgacacggcgaatgcggtggcaaccgttatttatacccgtgccatgcaaccacagcttgccgtggtcatggcggcattttttaacttttttggcgtattgcttggcgggcttagcgttgcctatgccatcgtccatatgttgccaaccgatttgttgctgaatatggggtcaactcacggtctggcgatggtcttttccatgctgctggcggcgattatctggaacctgggaacgtggttctttggtttaccggcctccagttcgcacactttgattggtgcgattatcggcattggtttaaccaacgcgctgttaaccggctcgtcggtgatggatgcgttaaacctgcgcgaagtcaccaagattttctcttcactcattgtctctcccatcgtggggctggtgattgcgggggggctaatttttctgctacgccgtttctggagtgggacgaaaaagcgtgaccgtattcatcgtattcctgaagatcgcaaaaagaaaaaaggcaaacgtaagccgccattctggacgcgtattgccctcattgtttccgctgcgggcgtggcgttttcgcacggcgcgaacgacgggcagaaaggaattggtctggtgatgctggtgctggtggggattgctcccgccgggtttgtcgtcaatatgaatgcgtccggctatgaaattacccgtacccgcgatgccgtcaccaacttcgaacactacctgcaacagcatcctgaactgccgcagaagttgattacgatggaacctccattgcctgcggcatcgactgatggcgcgcaagtgacggagtttcactgtcatccggcaaatacctttnatgcgattgcgcgcgttaaaacgatgctgccaggcaatatggaaagttacgagccgttaagcgtgagtcagcgcagccagctgcgccgcattatgctgtgcatctctgatacctccgcgaagctggcgaaactgccaggcgtcagtaaagaagaccagaacctgctgaaaaaactgcgcagcgatatgttaagcaccattgagtacgcaccggtatggatcatcatggcggtagcactggcgctcggcatcggcaccatgattggctggcgtcgtgtagcgatgaccatcggtgagaagattggtaagcgcggcatgacgtatgcgcaaggcatggcggcacaaatgacggcggcagtgtctatcggccttgccagttatattgggatgcccgtctccacaacacacgtactctcatctgccgtagcaggaacgatggtggtggacggcggtgggttacagcgtaaaacggtaaccagcatcctgatggcgtgggtatttactttaccggcggcgatttttctttctggtgggttgtactggatagcattgcagttgatttaa

SEQ ID NO: 6208 - protein, 499 aa, Escherichia coli
  misc_feature (313)..(313): Xaa can be any naturally occurring amino acid
MLNLFVGLDIYTGLLLLLALAFVLFYEAINGFHDTANAVATVIYTRAMQPQLAVVMAAFFNFFGVLLGGLSVAYAIVHMLPTDLLLNMGSTHGLAMVFSMLLAAIIWNLGTWFFGLPASSSHTLIGAIIGIGLTNALLTGSSVMDALNLREVTKIFSSLIVSPIVGLVIAGGLIFLLRRFWSGTKKRDRIHRIPEDRKKKKGKRKPPFWTRIALIVSAAGVAFSHGANDGQKGIGLVMLVLVGIAPAGFVVNMNASGYEITRTRDAVTNFEHYLQQHPELPQKLITMEPPLPAASTDGAQVTEFHCHPANTFXAIARVKTMLPGNMESYEPLSVSQRSQLRRIMLCISDTSAKLAKLPGVSKEDQNLLKKLRSDMLSTIEYAPVWIIMAVALALGIGTMIGWRRVAMTIGEKIGKRGMTYAQGMAAQMTAAVSIGLASYIGMPVSTTHVLSSAVAGTMVVDGGGLQRKTVTSILMAWVFTLPAAIFLSGGLYWIALQLI

SEQ ID NO: 6209 - DNA, 693 bp, Escherichia coli
  misc_feature (607)..(607): n is a, c, g or t
atgcagtcaataacacctccattaattgccgttattggtagcgatggttcaggcaagtcaacggtgtgtgaacatcttattaccgttgtcgaaaaatatggtgctgccgaaagggttcatttaggaaaacaggccggaaatgtcggtcgtgcagtgacaaaattaccgttgatgggaaaatccttacataaaacaattgaacgaaatcaggtaaaaacagcaaaaaaattgcctggaccagttccggcgctggtaattacagcgtttgtcgcccgtcgcttactgcgctttcgtcatatgcttgcctgtcgtcgtcgcgggttaattgttttaaccgaccgttatccgcaggaccagattcctggcgcttatgatggtacggtgtttccgcctaacgttgaaggtggtcgttttgtctcatggctggcaagtcaggaacgtaaagcatttcactggatggcgagccacaagcccgatctggtcatcaaactcaatgttgaccttgaagttgcctgcgcgcgtaaacccgaccataaacgggaatcgctggcgaggaagattgccataacgccacagttaacctttggtggtgcacaactggttgatntcgacgccaatcagccactggaaaaggtgctggttgatgcagaaaaagcgattacggattttatgaccgcgcgtggttatcactag

SEQ ID NO: 6210 - protein, 230 aa, Escherichia coli
  misc_feature (203)..(203): Xaa can be any naturally occurring amino acid
MQSITPPLIAVIGSDGSGKSTVCEHLITVVEKYGAAERVHLGKQAGNVGRAVTKLPLMGKSLHKTIERNQVKTAKKLPGPVPALVITAFVARRLLRFRHMLACRRRGLIVLTDRYPQDQIPGAYDGTVFPPNVEGGRFVSWLASQERKAFHWMASHKPDLVIKLNVDLEVACARKPDHKRESLARKIAITPQLTFGGAQLVDXDANQPLEKVLVDAEKAITDFMTARGYH

SEQ ID NO: 6211 - DNA, 1224 bp, Shigella sonnei
  misc_feature (342)..(342): n is a, c, g or t
atgcaaacccgattaacagaagagatgcggcagaacgcgcgcgcgctggaagccgacagcatcctgcgcgcctgtgttcactgcggattttgtaccgcaacctgcccaacctatcagcttctgggcgatgaactggacgggccgcgcgggcgcatctatctgattaaacaggtgctggaaggtaacgaagtcacgcttaaaacacaggaacatctcgatcgctgtctcacttgccgcaattgtgaaaccacctgtccttctggtgtgcgttatcacaatttgctggatatcgggcgtgatattgtcgagcagaaagtgaaacgcccactgccggagcgaatnctgcgcgaaggattgcgccaggtagtgccgcgtccggcggtcttccgtgcgctgacgcaggtagggctggtgctgcgaccgtttttaccggaacaggtcagagcaaaactgcctgctgaaaccgtgaaagctaaaccgcgtccaccactgcgccataagcgtcgggttttaatgctggaaggctgcgcccagcctacgctttcgcccaacaccaacgcggcaactgcgcgagtgctggatcgtctggggatcagcgtcatgccagctaacgaagcaggctgttgtggcgcggtggactatcatcttaatgcgcaagagaaagggttagcgcgggcgcgcaataatattgatgcctggtggcccgcgattgaagcaggtgccgaggcaattttgcaaaccgccagcggttgtggcgcgtttgtcaaagagtatgggcagatgctgaaaaacgatgcgttgtatgccgataaagcgcgtctggtcagtgaactggcggtcgatttagtcgaacttctgcgcgaggaaccgctggaaaaactggcaattcgcggcgataaaaaactggccttccactgcccgtgtaccctgcaacatgcgcaaaagttaaatggcgaagtggaaaaagtgttactgcgcctgggatttaccttaacggacgttcccgacagccatctgtgctgcggttcagcgggaacatatgcgttaacgcatcccgatctggcacgccagctgcgggataacaaaatgaatgcgctggaaagcggcaaaccggaaatgatcgtcaccgccaacattggttgccagacgcatctggcgagcgccggtcgtacctctgtgcgtcactggattgaaattgtagagcaagcccttgaaaaggaataa

SEQ ID NO: 6212 - protein, 407 aa, Shigella sonnei
  misc_feature (114)..(114): Xaa can be any naturally occurring amino acid
MQTRLTEEMRQNARALEADSILRACVHCGFCTATCPTYQLLGDELDGPRGRIYLIKQVLEGNEVTLKTQEHLDRCLTCRNCETTCPSGVRYHNLLDIGRDIVEQKVKRPLPERXLREGLRQVVPRPAVFRALTQVGLVLRPFLPEQVRAKLPAETVKAKPRPPLRHKRRVLMLEGCAQPTLSPNTNAATARVLDRLGISVMPANEAGCCGAVDYHLNAQEKGLARARNNIDAWWPAIEAGAEAILQTASGCGAFVKEYGQMLKNDALYADKARLVSELAVDLVELLREEPLEKLAIRGDKKLAFHCPCTLQHAQKLNGEVEKVLLRLGFTLTDVPDSHLCCGSAGTYALTHPDLARQLRDNKMNALESGKPEMIVTANIGCQTHLASAGRTSVRHWIEIVEQALEKE

SEQ ID NO: 6213 - DNA, 2172 bp, Citrobacter koseri
  misc_feature (664)..(664): n is a, c, g or t
atgagtcaaaccataacccagggccgtttacgcattgacgccaattttaaacgttttgtggatgaagaagttttgcctggcgtggaactggatgctgccgcgttctggcacaatgttgatgagatcgttcacgatctggcgccagagaatcgtcagttgctggcagagcgcgatcgcattcaggcggcgcttgatgagtggcatcgcagcaatccggggccggtaaaagataaagcagcctataaatctttcctgcgtgaactgggctacctggtgccacagcctgaccacgttacggtggaaaccacgggcatcgacagcgaaatcaccagtcaggcggggccacagctggtggttccggcgatgaacgcccgctacgcgctgaacgcggcgaacgctcgctggggctcactgtacgatgcgttatacggcagcgacatcatcccgcaggaaggggcgatggtcagcggctacgatccgcagcgtggtgagcaggttatcgcctgggttcggcgtttcctcgatgaatcactaccgctggaaaacggcagctatcaggatgtggtggcgtttaaggtggtcgataaacaattacgcatccagttgaaaaatggtaaagaaaccacgttacgtactccagcacagtttgtcggttaccgtggcnatactactgcgctgacctgcattttgctgaaaaataacggcctgcatattgagctacaaatcgatgccaacgggcggattggcaaagacgatccggcgcacatcaacgatgttatcgtcgaagcggccatcagtaccattctcgactgcgaagattcggtcgcggcggttgatgcggaagataaaatcctgctgtatcgcaacctgcagggcctgatgcaggggactctgcaagagaaaatggagaagaacggtcggcaaatcgtgcgtaaactgaatgacgatcgtcagtacactgccgccgatggatctgaaatttctctgcacggacgctcgttgctgtttatccgcaacgtgggtcatttgatgaccattcctgtgatttgggacagcgaaggcaatgaaatcccggaaggcattcttgatggcgtcatgactggcgcgattgccctctatgatttaaaagtgcagaaaaactcgcgcactggcagcgtctatattgtgaaaccgaaaatgcacggtccgcaggaagtggcgttcgccaacaaactgttttcccgcgttgagacaatgctcggtatggcaccgaataccctgaaaatgggcattatggatgaagaacgccggacctcgctgaacttgcgtagctgtatcgctcaggcgcgcaaccgcgtggcgttcatcaataccggtttcctcgaccgtaccggcgatgaaatgcattcggtgatggaagcgggcccgatgcagcgtaaaaaccagatgaaatcgacgccgtggatcaaagcctacgaacgtaataacgtgctttccggtctgttctgtgggctacgtggaaaagcgcaaatcggtaaaggcatgtgggcaatgccggacctgatggcagacatgtacagccagaagggcgaccaattgcgtgccggggcaaacacggcctgggttccgtcgccaactgccgctacgctccatgcgctgcactaccaccaaaccaacgtacagagcgtgcaagccaacattgcccagaccgagttcaatgctgaatttgaacctctgctggacgatctgctgactattccggttgctgaaaacgctaactggtcggcgcaagagatccaacaagagctggataacaacgtgcaggggattctggggtacgtggtgcgttgggtggagcaggggattggttgttcaaaagtgccggatattcacaacgtggcgttgatggaagaccgcgcaacgctgcgtatttccagccagcatatcgccaactggttacgtcacggtattctgaccaaagatcaggtgcaggcgtcgctggagaatatggcgaaagtggttgatcagcaaaacgctggcgatccggcttatcgtccgatggcggggaatttcgctaactcgtgtgcttttaaagctgcctgcgatttgatcttcctcggcgtgaaacagccaaacggctataccgaaccgttattacacgcctggcgtttacgcgaaaaagaaagtcattaa

SEQ ID NO: 6214 - protein, 723 aa, Citrobacter koseri
  misc_feature (222)..(222): Xaa can be any naturally occurring amino acid
MSQTITQGRLRIDANFKRFVDEEVLPGVELDAAAFWHNVDEIVHDLAPENRQLLAERDRIQAALDEWHRSNPGPVKDKAAYKSFLRELGYLVPQPDHVTVETTGIDSEITSQAGPQLVVPAMNARYALNAANARWGSLYDALYGSDIIPQEGAMVSGYDPQRGEQVIAWVRRFLDESLPLENGSYQDVVAFKVVDKQLRIQLKNGKETTLRTPAQFVGYRGXTTALTCILLKNNGLHIELQIDANGRIGKDDPAHINDVIVEAAISTILDCEDSVAAVDAEDKILLYRNLQGLMQGTLQEKMEKNGRQIVRKLNDDRQYTAADGSEISLHGRSLLFIRNVGHLMTIPVIWDSEGNEIPEGILDGVMTGAIALYDLKVQKNSRTGSVYIVKPKMHGPQEVAFANKLFSRVETMLGMAPNTLKMGIMDEERRTSLNLRSCIAQARNRVAFINTGFLDRTGDEMHSVMEAGPMQRKNQMKSTPWIKAYERNNVLSGLFCGLRGKAQIGKGMWAMPDLMADMYSQKGDQLRAGANTAWVPSPTAATLHALHYHQTNVQSVQANIAQTEFNAEFEPLLDDLLTIPVAENANWSAQEIQQELDNNVQGILGYVVRWVEQGIGCSKVPDIHNVALMEDRATLRISSQHIANWLRHGILTKDQVQASLENMAKVVDQQNAGDPAYRPMAGNFANSCAFKAACDLIFLGVKQPNGYTEPLLHAWRLREKESH

SEQ ID NO: 6215 - DNA, 2172 bp, Citrobacter koseri
  misc_feature (670)..(670): n is a, c, g or t
atgagtcaaaccataacccagggccgtttacgcattgacgccaattttaaacgttttgtggatgaagaagttttgcctggcgtggaactggatgctgccgcgttctggcacaatgttgatgagatcgttcacgatctggcgccagagaatcgtcagttgctggcagagcgcgatcgcattcaggcggcgcttgatgagtggcatcgcagcaatccggggccggtaaaagataaagcagcctataaatctttcctgcgtgaactgggctacctggtgccacagcctgaccacgttacggtggaaaccacgggcatcgacagcgaaatcaccagtcaggcggggccacagctggtggttccggcgatgaacgcccgctacgcgctgaacgcggcgaacgctcgctggggctcactgtacgatgcgttatacggcagcgacatcatcccgcaggaaggggcgatggtcagcggctacgatccgcagcgtggtgagcaggttatcgcctgggttcggcgtttcctcgatgaatcactaccgctggaaaacggcagctatcaggatgtggtggcgtttaaggtggtcgataaacaattacgcatccagttgaaaaatggtaaagaaaccacgttacgtactccagcacagtttgtcggttaccgtggcgatactnctgcgctgacctgcattttgctgaaaaataacggcctgcatattgagctacaaatcgatgccaacgggcggattggcaaagacgatccggcgcacatcaacgatgttatcgtcgaagcggccatcagtaccattctcgactgcgaagattcggtcgcggcggttgatgcggaagataaaatcctgctgtatcgcaacctgcagggcctgatgcaggggactctgcaagagaaaatggagaagaacggtcggcaaatcgtgcgtaaactgaatgacgatcgtcagtacactgccgccgatggatctgaaatttctctgcacggacgctcgttgctgtttatccgcaacgtgggtcatttgatgaccattcctgtgatttgggacagcgaaggcaatgaaatcccggaaggcattcttgatggcgtcatgactggcgcgattgccctctatgatttaaaagtgcagaaaaactcgcgcactggcagcgtctatattgtgaaaccgaaaatgcacggtccgcaggaagtggcgttcgccaacaaactgttttcccgcgttgagacaatgctcggtatggcaccgaataccctgaaaatgggcattatggatgaagaacgccggacctcgctgaacttgcgtagctgtatcgctcaggcgcgcaaccgcgtggcgttcatcaataccggtttcctcgaccgtaccggcgatgaaatgcattcggtgatggaagcgggcccgatgcagcgtaaaaaccagatgaaatcgacgccgtggatcaaagcctacgaacgtaataacgtgctttccggtctgttctgtgggctacgtggaaaagcgcaaatcggtaaaggcatgtgggcaatgccggacctgatggcagacatgtacagccagaagggcgaccaattgcgtgccggggcaaacacggcctgggttccgtcgccaactgccgctacgctccatgcgctgcactaccaccaaaccaacgtacagagcgtgcaagccaacattgcccagaccgagttcaatgctgaatttgaacctctgctggacgatctgctgactattccggttgctgaaaacgctaactggtcggcgcaagagatccaacaagagctggataacaacgtgcaggggattctggggtacgtggtgcgttgggtggagcaggggattggttgttcaaaagtgccggatattcacaacgtggcgttgatggaagaccgcgcaacgctgcgtatttccagccagcatatcgccaactggttacgtcacggtattctgaccaaagatcaggtgcaggcgtcgctggagaatatggcgaaagtggttgatcagcaaaacgctggcgatccggcttatcgtccgatggcggggaatttcgctaactcgtgtgcttttaaagctgcctgcgatttgatcttcctcggcgtgaaacagccaaacggctataccgaaccgttattacacgcctggcgtttacgcgaaaaagaaagtcattaa

SEQ ID NO: 6216 - protein, 723 aa, Citrobacter koseri
  misc_feature (224)..(224): Xaa can be any naturally occurring amino acid
MSQTITQGRLRIDANFKRFVDEEVLPGVELDAAAFWHNVDEIVHDLAPENRQLLAERDRIQAALDEWHRSNPGPVKDKAAYKSFLRELGYLVPQPDHVTVETTGIDSEITSQAGPQLVVPAMNARYALNAANARWGSLYDALYGSDIIPQEGAMVSGYDPQRGEQVIAWVRRFLDESLPLENGSYQDVVAFKVVDKQLRIQLKNGKETTLRTPAQFVGYRGDTXALTCILLKNNGLHIELQIDANGRIGKDDPAHINDVIVEAAISTILDCEDSVAAVDAEDKILLYRNLQGLMQGTLQEKMEKNGRQIVRKLNDDRQYTAADGSEISLHGRSLLFIRNVGHLMTIPVIWDSEGNEIPEGILDGVMTGAIALYDLKVQKNSRTGSVYIVKPKMHGPQEVAFANKLFSRVETMLGMAPNTLKMGIMDEERRTSLNLRSCIAQARNRVAFINTGFLDRTGDEMHSVMEAGPMQRKNQMKSTPWIKAYERNNVLSGLFCGLRGKAQIGKGMWAMPDLMADMYSQKGDQLRAGANTAWVPSPTAATLHALHYHQTNVQSVQANIAQTEFNAEFEPLLDDLLTIPVAENANWSAQEIQQELDNNVQGILGYVVRWVEQGIGCSKVPDIHNVALMEDRATLRISSQHIANWLRHGILTKDQVQASLENMAKVVDQQNAGDPAYRPMAGNFANSCAFKAACDLIFLGVKQPNGYTEPLLHAWRLREKESH

SEQ ID NO: 6217 - DNA, 1179 bp, Escherichia coli
  misc_feature (536)..(536): n is a, c, g or t
gtgagttccatgcttgagatttatttcccgctttgcgccgctgatcccatccgttggcagcgccgtacacccgacgtggagcacggcatctggcctgacgtcgccgacgaatatctccagcaatggctgcaaacagacacaattcgactctatattcccggcgaatggatcagcgtctggcaggttgaactgcctgatgtgcctcgcaagcagataccgacgattctgcccgccttgctggaagaagagctgaaccaggatatcgatgaactgcatttcgccccgttgaaaatcgaccagcaactggcaaccgtagctgtgattcaccagcagcatatgcgcaacattgcgcagtggttgcaggcaaacggcatcacccgcgctaccgtcgcgccagactggatgtccattccttgtgggtttatggctggcgatgcgcaacgggttatctgccgcatcgatgaatgccggggatggagcgccgggcgggcgctggctccggtcatgttccgcgcacagctcaatgagcagaattnaccgatttcactaaccgtggtcggcattgcaccggaagaactgtctgcatgggctggtgcggacgccgaacgcctgaccgttacggctctgcccgccattaccacttatggcgaatcggaagggaacctgctaacagggccgtggcagcctcgtgtcagctaccgaaaacagtgggcgcgctggcgggtgatgattctgccgatattgctgattctggttgcgctggtagtggaacggggcgtgacgttatggagcgtcagcgaacaggtggcgcaaagccgcacccaggcggagaaacagttcttaacgctattcccggagcagaagcggattgtgaatttacgctcgcaggtgacgatggcgctgaaaaaatatcgcccacaggccgacgatacccggctgctcgcagaattgtcagcgatcgccagtaccctgaaatcagcgtcacttaccgatatcgaaatgcgtggtttcacctttgatcaaaaacgccagacgcttcacctccaactgcgggctgcgaactttgccagcttcgacaaactgcgtagcgcactggcggcagattatgttgtgcaacaggacgcgttacagaaagagggtgatgcggtttccggcggcgtaacgttgcggaggaaataa

SEQ ID NO: 6218 - protein, 392 aa, Escherichia coli
  misc_feature (179)..(179): Xaa can be any naturally occurring amino acid
MSSMLEIYFPLCAADPIRWQRRTPDVEHGIWPDVADEYLQQWLQTDTIRLYIPGEWISVWQVELPDVPRKQIPTILPALLEEELNQDIDELHFAPLKIDQQLATVAVIHQQHMRNIAQWLQANGITRATVAPDWMSIPCGFMAGDAQRVICRIDECRGWSAGRALAPVMFRAQLNEQNXPISLTVVGIAPEELSAWAGADAERLTVTALPAITTYGESEGNLLTGPWQPRVSYRKQWARWRVMILPILLILVALVVERGVTLWSVSEQVAQSRTQAEKQFLTLFPEQKRIVNLRSQVTMALKKYRPQADDTRLLAELSAIASTLKSASLTDIEMRGFTFDQKRQTLHLQLRAANFASFDKLRSALAADYVVQQDALQKEGDAVSGGVTLRRK

SEQ ID NO: 6219 - DNA, 1647 bp, Escherichia coli
  misc_feature (1214)..(1214): n is a, c, g or t
atgaaagtgacattaacgttcaacgaacaacgtcgtgcggcgtatcgtcagcaagggttatggggcgatgcttcactggccgattactggcagcagaccgctcgtgcgatgccagacaaaattgccgtggtcgacaatcatggtgcaacgtacacctatagcgcgctcgatcacgccgcgagctgtctggcaaactggatgttagcgaagggtattgaatcaggcgatcgcatcgcatttcaactgccaggctggtgtgaatttaccgttatctatcttgcctgcctgaaaaccggtgcggtttccgtgccgctgttaccttcctggcgggaagcagaactggtgtgggtgctcaataagtgtcaggcaaaaatgttctttgcaccgacgttgtttaaacaaacgcgtccggtagatttaatcctgccgctgcaaaatcagcttccacaactacaacaaattgtcggcgtggacaaactggctcccgccacctcttccctctcattaagtcagattctcgccgacaatactcctctgaccacggcgataacggtccacggcgatgaattagccgctgtgctatttacatccggaaccgagggtctgccaaagggtgtgatgctaacgcataacaatattctcgccagtgagcgggcttattgcgcgcggctaaatctgacctggcaggatgtctttatgatgcctgcgccacttggtcacgcaacgggctttctgcatggcgtaacagcaccttttttgattggtgctcgcagcgtgttgttagatattttcactcctgatgcgtgtctcgcgctgcttgagcagcagcgttgcacctgtatgctcggcgcaacgccgtttgtctatgatcttttgaatttactagagaaacaacccgcagacctttcagcgctgcgcttctttctttgcggaggtaccacaatccccaaaaaagtggcgcgagaatgccagcagcgcggcattaaattattaagtgtttatggttccacagaaagttcgccgcatgcggtggtgaatctcgacgatcctttgccgcgctttatgcacaccgacggttacgctgccgcaggtgtagagattaaagtggtcgatgacgcacgcaagactttaccgccaggttgcgaaggtgaagaagcctcgcgtggccccaatgtgtttatggggtattttgatgaacctgaattaaccgcccntgccctggatgaagaaggctggtattacagcggcgatctctgccgcatggatgaggctggctatataaaaataaccgggcgcaagaaagatattattgtccgcggcggcgaaaatattagcagccgtgaagtggaagatattttattacagcatcctaaaattcacgatgcctgtgtggttgcgatgcccgatgaacgcttaggtgaacgatcatgcgcttatgtcgtgctgaaagcgccgcatcattcattatcgctggaagaggtggtggctttttttagccgtaaacgggtcgcgaaatataaatatcctgaacatatcgtggtaatcgaaaaactaccgcgcactgtctcaggtaaaatacaaaagtttttgttaaggaaagatattatgcggcgattaactcaggatgtctgtgaagagattgaataa

SEQ ID NO: 6220 - protein, 548 aa, Escherichia coli
  misc_feature (405)..(405): Xaa can be any naturally occurring amino acid
MKVTLTFNEQRRAAYRQQGLWGDASLADYWQQTARAMPDKIAVVDNHGATYTYSALDHAASCLANWMLAKGIESGDRIAFQLPGWCEFTVIYLACLKTGAVSVPLLPSWREAELVWVLNKCQAKMFFAPTLFKQTRPVDLILPLQNQLPQLQQIVGVDKLAPATSSLSLSQILADNTPLTTAITVHGDELAAVLFTSGTEGLPKGVMLTHNNILASERAYCARLNLTWQDVFMMPAPLGHATGFLHGVTAPFLIGARSVLLDIFTPDACLALLEQQRCTCMLGATPFVYDLLNLLEKQPADLSALRFFLCGGTTIPKKVARECQQRGIKLLSVYGSTESSPHAVVNLDDPLPRFMHTDGYAAAGVEIKVVDDARKTLPPGCEGEEASRGPNVFMGYFDEPELTAXALDEEGWYYSGDLCRMDEAGYIKITGRKKDIIVRGGENISSREVEDILLQHPKIHDACVVAMPDERLGERSCAYVVLKAPHHSLSLEEVVAFFSRKRVAKYKYPEHIVVIEKLPRTVSGKIQKFLLRKDIMRRLTQDVCEEIE

SEQ ID NO: 6221 - DNA, 1479 bp, Escherichia coli
  misc_feature (763)..(763): n is a, c, g or t
atgactttatggatcaacggtgactgggtaacgggccagggcgcattgcgtgtgaagcgtaatccggtatcgggcgaggtgttatggcagggcaatgatgccgatgccgctcaggtcgggcaggcttgtcgggctgcccgtgcggcgtttccgcgctgggctcggctctcatttggcgatcgtcaggtaagagttgaacgctttgccggattgctggaaagcaataaagccgaattaaccgcgattattgccagagaaaccggcaagccgcgctgggaagcggcaaccgaagtgacggcgatgatcaataaaatcgcgatatcaattaaggcgtatcacgttcgtaccggtgagcagcgtagcgaaatgccggacggcgcggcgagcctgcgacatcgcccgcacggcgtgctggcggtgtttgggccgtataatttccctggtcatttgccgaacggacatatcgttccggcattgctggcaggtaacaccattatctttaaacccagcgaactgacaccgtggagtggcgacgcggtaatgcgtttatggcagcaggctggcttgccgccgggcgtgctgaacctggtgcagggcgggcgtgcaacgggtcaggcgctgagtgcgctggaggatctcgacggcttgctgtttaccggcagcgccaataccggctaccagctgcatcgccagctttccggtcagccggagaaaattctcgcccttgagatgggcggtaataacccgctaattatcgatgagntggcggatatcgatgccgctgtccatctgaccattcagtcggcgtttgtcactgccgggcaacgctgcacctgcgcccgccgtttatttctgaaaagtggaacgcagggcgatgcatttcttgctcgcctggttgccgtcagccagcggttaacgccgggcacttgggatgacgaaccgcagccatttattggtgggctgatttctgagcaggccgcacagcaggtggttactgcctggcaggaactggaggcgatgggcggacggaccctgcttgcgccgcgcttattacaagcagggacatcgttgctgacgccggggatcattgaaatgacaggcgttactggcttgccggatgaagaagtgttcggaccgttattgcgcgtctggcgttatgatactttcgatgaagcgattcgaatggcgaataacactcgctttggcctctcttgcggtctggtttcccccgagcgggaaaaattcgatcaactgttgctggaggcgcgggcggggattgttaactggaacaaaccgcttaccggcgctgccagtaccgcgccattcggcggcattggcgcttccggtaaccatcgccccagcgcctggtatgccgcagattattgtgcctggccgatggcgagcctggagtcggactcgttaacattgcccgccacgcttaaccctgggctggatttttccgatgaggtggtgcgatga

SEQ ID NO: 6222 - protein, 492 aa, Escherichia coli
  misc_feature (255)..(255): Xaa can be any naturally occurring amino acid
MTLWINGDWVTGQGALRVKRNPVSGEVLWQGNDADAAQVGQACRAARAAFPRWARLSFGDRQVRVERFAGLLESNKAELTAIIARETGKPRWEAATEVTAMINKIAISIKAYHVRTGEQRSEMPDGAASLRHRPHGVLAVFGPYNFPGHLPNGHIVPALLAGNTIIFKPSELTPWSGDAVMRLWQQAGLPPGVLNLVQGGRATGQALSALEDLDGLLFTGSANTGYQLHRQLSGQPEKILALEMGGNNPLIIDEXADIDAAVHLTIQSAFVTAGQRCTCARRLFLKSGTQGDAFLARLVAVSQRLTPGTWDDEPQPFIGGLISEQAAQQVVTAWQELEAMGGRTLLAPRLLQAGTSLLTPGIIEMTGVTGLPDEEVFGPLLRVWRYDTFDEAIRMANNTRFGLSCGLVSPEREKFDQLLLEARAGIVNWNKPLTGAASTAPFGGIGASGNHRPSAWYAADYCAWPMASLESDSLTLPATLNPGLDFSDEVVR

SEQ ID NO: 6223 - DNA, 711 bp, Acinetobacter pittii
  misc_feature (235)..(235): n is a, c, g or t
atgaacgctgagcgtaaatttctttttgcctgtcttatttttgcgctgctcatttacgctatccacgctttcggtttattcgatctgctcaccgatttacctcacttacaaacactcatccgccagagcggattgttcggttatagcctctatattttgttattcatcattgccaccctctttctgttaccaggaagcatactggtgatcgctggaggaatagtttttggcccgntcttagggacactactctcattaattgccgccacgctggcctcctcgtgctcattcctgctggcgcgctggctggggcgtgatttactgctgaaatatgtgggccatagccatacttttaaggccattgaaaaaggcattgcgcgtaacggtattgattttcttattctgacccgcttaatcccgttgtttccttacaatattcaaaattacgcttacggattaaccacaatcgccttctggccttatacccttatttcagcactcacgactctgcccggtattgttatttataccgtgatggcaagcgatctcgccaatgaaggcattacgctgcgctttattttacaactctgtctggcgggcctggcgctgtttattctcgtccagctcgccaaactctacgcccgacacaaacatgtggatctgtctgcttctcgccgcagcccactttctcacccaaaaaataaaggatag

SEQ ID NO: 6224 - protein, 236 aa, Acinetobacter pittii
  misc_feature (79)..(79): Xaa can be any naturally occurring amino acid
MNAERKFLFACLIFALLIYAIHAFGLFDLLTDLPHLQTLIRQSGLFGYSLYILLFIIATLFLLPGSILVIAGGIVFGPXLGTLLSLIAATLASSCSFLLARWLGRDLLLKYVGHSHTFKAIEKGIARNGIDFLILTRLIPLFPYNIQNYAYGLTTIAFWPYTLISALTTLPGIVIYTVMASDLANEGITLRFILQLCLAGLALFILVQLAKLYARHKHVDLSASRRSPLSHPKNKG

SEQ ID NO: 6225 - DNA, 1536 bp, Escherichia coli
  misc_feature (1004)..(1004): n is a, c, g or t
atggctacaccgttacggtacgcattaatctttttgctgtgggcgatgatagcggtgatttatgcaccgctgatcccggcagctctgacgctgatatcgcctgctttgtcgttgacgcactggcaggcgttatttgccgatccacagttaccgcaggcattactggcaacgctggtgtcgacaaccattgcggcggtcggggcgttgttgattgccctgctggtgattgtggcgctgtggccagggccgaaatggcagcgtatgtgcgcccgtctgccgtggctgctcgccattccccatgtggcttttgccaccagcgcccttctgatctttgctgacggagggctgctttatgactatttcccgtatttcactccgccaatggacaaattgggtattgggctgggcctcaccctggcggtaaaagaaagcgcatttctgctgtggatcttagcggcagtattgagcgaaaaacggctgttgcagcaactcattgtgctggattcgctgggctacagccgctggcaatgcctgaactggttgctgttgccctccgtcgcgtctgcgctggcaatggcgatgctggcgattgtcgcctggtcgctgtcggtcgtggatgtggcgattattcttgggccaggtaatcccccgacgctggcggtaattagctggcagtggttaactcagggcgacgccgatcaacaaacgaaaggtgcactcgccagcctgctgctgatgctgttactcgccgcctacgttttgctgggctatctgctatggcgtggctggcgacgtactattccccgcgtagatggcgttcgtaagcctgccacgcctttattgccaggcaatacgctggcgagttttttacccttaaccggtgtgctgtgtgtggttctgctggcgatcctcgcggatcagtcgacgatcaatagtgaagcgctcatcaacagcctgacaatggggctggtggcggcattcatcgctttgctcctgttactgcngtggcaggaatgggggccacagcgtcgccagttgtggctatggttgcccattttattacccgctctgcctctggtggcgggccagtacacgctggcgctatggctgaacctggatggaagctggacggcggtggtctgggggcatctgctgtgggtaatgccgtggatgctgtttatcctgcaacccgcctggcagcgcattgattcacggttaattttgattgcgcaaacactgggctggtcgcgggccaaaatcttcttttacgtaaaatgtccacttatgttgcgccctgcgctgattgccttcgcggtgggattttcagtcagtattgcgcagtatatgccgacgctgtggctgggcgcggggcgttttccgacgctcaccactgaagcggtggcattaagcagcggcggcagcaacggtattctcgccgcccaggctttatggcaactgctgttaccgcttattatttttgccctgaccgcgttagtcgcaaaatgggtaggttatgtcagacaaggactccgctaa

SEQ ID NO: 6226 - protein, 511 aa, Escherichia coli
  misc_feature (335)..(335): Xaa can be any naturally occurring amino acid
MATPLRYALIFLLWAMIAVIYAPLIPAALTLISPALSLTHWQALFADPQLPQALLATLVSTTIAAVGALLIALLVIVALWPGPKWQRMCARLPWLLAIPHVAFATSALLIFADGGLLYDYFPYFTPPMDKLGIGLGLTLAVKESAFLLWILAAVLSEKRLLQQLIVLDSLGYSRWQCLNWLLLPSVASALAMAMLAIVAWSLSVVDVAIILGPGNPPTLAVISWQWLTQGDADQQTKGALASLLLMLLLAAYVLLGYLLWRGWRRTIPRVDGVRKPATPLLPGNTLASFLPLTGVLCVVLLAILADQSTINSEALINSLTMGLVAAFIALLLLLXWQEWGPQRRQLWLWLPILLPALPLVAGQYTLALWLNLDGSWTAVVWGHLLWVMPWMLFILQPAWQRIDSRLILIAQTLGWSRAKIFFYVKCPLMLRPALIAFAVGFSVSIAQYMPTLWLGAGRFPTLTTEAVALSSGGSNGILAAQALWQLLLPLIIFALTALVAKWVGYVRQGLR

SEQ ID NO: 6227 - DNA, 1044 bp, Klebsiella oxytoca
  misc_feature (662)..(662): n is a, c, g or t
atgaaaaattcaaaagcaatattgcaggtgccgggcacaatgaaaattatttcagcagaaatacctgtgcctaaagaagatgaagttttgattaaagtggaatatgtcggtatttgtggttcagatgtacatggttttgaatcaggcccgtttattcctcctaaagacccaaatcaagaaattggcctgggtcatgaatgtgccgggacggttgtggctgtgggaagccgcgtgcgcaaatttaaaccgggggatcgggtaaatatcgaacctggcgttccttgcggtcactgtcgttactgtctggaaggcaaatataacatttgcccggacgttgattttatggcgacacaacccaactaccgcggcgcattaacgcactatctgtgtcatccggagagctttacttacaaactgccagacaatatggacacgatggaaggggcgctggtggagcctgccgcagtcgggatgcatgccgcgatgctggcagatgttaaacctggtaagaagataattattctgggagcgggttgtattggtttgatgacgttgcaagcgtgcaaatgcctgggagcaacggaaattgccgtcgttgatgtgctggaaaaacgtctgacaatggcggaacagctcggcgcgacagtggttattaacggcgnaaaagaagacactattgcacgctgtcagcaatttaccgaagacatgggcgcagatattgtttttgaaacagcgggttctgcggtcaccgttaaacaggcaccttatctggtcatgcgcggcggtaaaattatgattgttggtactgtacccggcgattcggcaatcaatttcctcaaaatcaatcgcgaagtcactatccagacggtattccgctatgccaatcgttatccggtcacgattgaagctatttcttcagggcgattcgatgtgaaatcgatggtgacgcatatttacgattatcgggatgtacaacaggcatttgaagagtcagttaacaacaaacgcgacattattaaaggcgttattaaaattagcgattaa

SEQ ID NO: 6228 - protein, 347 aa, Klebsiella oxytoca
  misc_feature (221)..(221): Xaa can be any naturally occurring amino acid
MKNSKAILQVPGTMKIISAEIPVPKEDEVLIKVEYVGICGSDVHGFESGPFIPPKDPNQEIGLGHECAGTVVAVGSRVRKFKPGDRVNIEPGVPCGHCRYCLEGKYNICPDVDFMATQPNYRGALTHYLCHPESFTYKLPDNMDTMEGALVEPAAVGMHAAMLADVKPGKKIIILGAGCIGLMTLQACKCLGATEIAVVDVLEKRLTMAEQLGATVVINGXKEDTIARCQQFTEDMGADIVFETAGSAVTVKQAPYLVMRGGKIMIVGTVPGDSAINFLKINREVTIQTVFRYANRYPVTIEAISSGRFDVKSMVTHIYDYRDVQQAFEESVNNKRDIIKGVIKISD

SEQ ID NO: 6229 - DNA, 1101 bp, Citrobacter koseri
  misc_feature (780)..(780): n is a, c, g or t
atgcgagggaaaaaacgcattgggttattgtttttgctgatagcggttgtggttggtggcggcgggttattgctggcgcaaaaagccttacataaaacgtcggataccgcattttgcctttcctgccactcgatgagtaaaccttttgaggaatatcagggaactgtccacttttcaaaccagaaagggatacgtgcggaatgtgccgattgccatattccaaagtcagggatggattatttatttgctaaattaaaagcatctaaagatatttatcatgaatttgttagcggcaaaatagacagtgatgataagttcgaagctcatcgccaggaaatggccgaaacagtatggaaagaattaaaagcaactgactctgcaacctgccgtagttgccattcttttgatgccatggatattgactcgcaaagtgaatctgcgcagaaaatgcataataaagcgcaaaaggacggcgaaacctgtatcgattgccataaaggcattgcccattttccgccagaaataaaaatggatgacaacgcggcgcatgagctggaaagtcaggccgctacttcagttactaatggcgcacatatttatcctttcaaaacttctcgcataggcgaactggctaccgtgaatcctggtaccgatctcaccgtcgttgatgccagtggcaaacagccgatcgttctgttgcagggttatcaaatgcagggcagtgaaagcacgctctacctggcggcaggtcaacgtctggcgctagccacattaagtgangaaggtatcaaggcgctgacggtaaacggggaatggcaggctgacgaatacggcaatcaatggcgtcaggcgtctttacagggtgtgcttaccgatcccgcattagcggaccgtaaaccgctatggcaatacgctgaaaaacttgacgatacctattgcgctggttgccatgcccctattgccgctgaccattacaccgtcaatgcttggccgtccattgccaaaggtatgggggcgcgaaccagcatgagcgaaaacgaactggacattttgacgcggtacttccagtacaacgccaaagatattaccgagaaacagtga

SEQ ID NO: 6230 - protein, 366 aa, Citrobacter koseri
  misc_feature (260)..(260): Xaa can be any naturally occurring amino acid
MRGKKRIGLLFLLIAVVVGGGGLLLAQKALHKTSDTAFCLSCHSMSKPFEEYQGTVHFSNQKGIRAECADCHIPKSGMDYLFAKLKASKDIYHEFVSGKIDSDDKFEAHRQEMAETVWKELKATDSATCRSCHSFDAMDIDSQSESAQKMHNKAQKDGETCIDCHKGIAHFPPEIKMDDNAAHELESQAATSVTNGAHIYPFKTSRIGELATVNPGTDLTVVDASGKQPIVLLQGYQMQGSESTLYLAAGQRLALATLSXEGIKALTVNGEWQADEYGNQWRQASLQGVLTDPALADRKPLWQYAEKLDDTYCAGCHAPIAADHYTVNAWPSIAKGMGARTSMSENELDILTRYFQYNAKDITEKQ

SEQ ID NO: 6231 - DNA, 1101 bp, Escherichia coli
  misc_feature (728)..(728): n is a, c, g or t
atgcgagggaaaaaacgcattgggttattgtttttgctgatagcggttgtggttggtggcggcgggttattgctggcgcaaaaagccttacataaaacgtcggataccgcattttgcctttcctgccactcgatgagtaaaccttttgaggaatatcagggaactgtccacttttcaaaccagaaagggatacgtgcggaatgtgccgattgccatattccaaagtcagggatggattatttatttgctaaattaaaagcatctaaagatatttatcatgaatttgttagcggcaaaatagacagtgatgataagttcgaagctcatcgccaggaaatggccgaaacagtatggaaagaattaaaagcaactgactctgcaacctgccgtagttgccattcttttgatgccatggatattgactcgcaaagtgaatctgcgcagaaaatgcataataaagcgcaaaaggacggcgaaacctgtatcgattgccataaaggcattgcccattttccgccagaaataaaaatggatgacaacgcggcgcatgagctggaaagtcaggccgctacttcagttactaatggcgcacatatttatcctttcaaaacttctcgcataggcgaactggctaccgtgaatcctggtaccgatctcaccgtcgttgatgccagtggcaaacagccgatcgttctgttgcagggttatcaaatgcagggcagtgaaancacgctctacctggcggcaggtcaacgtctggcgctagccacattaagtgatgaaggtatcaaggcgctgacggtaaacggggaatggcaggctgacgaatacggcaatcaatggcgtcaggcgtctttacagggtgtgcttaccgatcccgcattagcggaccgtaaaccgctatggcaatacgctgaaaaacttgacgatacctattgcgctggttgccatgcccctattgccgctgaccattacaccgtcaatgcttggccgtccattgccaaaggtatgggggcgcgaaccagcatgagcgaaaacgaactggacattttgacgcggtacttccagtacaacgccaaagatattaccgagaaacagtga

SEQ ID NO: 6232 - protein, 366 aa, Escherichia coli
  misc_feature (243)..(243): Xaa can be any naturally occurring amino acid
MRGKKRIGLLFLLIAVVVGGGGLLLAQKALHKTSDTAFCLSCHSMSKPFEEYQGTVHFSNQKGIRAECADCHIPKSGMDYLFAKLKASKDIYHEFVSGKIDSDDKFEAHRQEMAETVWKELKATDSATCRSCHSFDAMDIDSQSESAQKMHNKAQKDGETCIDCHKGIAHFPPEIKMDDNAAHELESQAATSVTNGAHIYPFKTSRIGELATVNPGTDLTVVDASGKQPIVLLQGYQMQGSEXTLYLAAGQRLALATLSDEGIKALTVNGEWQADEYGNQWRQASLQGVLTDPALADRKPLWQYAEKLDDTYCAGCHAPIAADHYTVNAWPSIAKGMGARTSMSENELDILTRYFQYNAKDITEKQ

SEQ ID NO: 6233 - DNA, 921 bp, Escherichia coli
  misc_feature (902)..(902): n is a, c, g or t
atgcgtttccgccagttgttaccgctttttggcgcgctgtttgcgttgtatatcatttggggctcaacctattttgtcattcggattggcgtggaaagctggcctccgttaatgatggcgggcgttcgattcctggcagccggtattttattgctggcatttttgctactgcgcggacacaaacttcccccgctacgtccgctgctcaatgccgcgctgattggcctgttattgctggctgtcggtaatggcatggtgacggttgccgaacatcaaaatgttccttccggcatcgccgccgtagtggttgcaaccgtgcccctctttaccctgtgcttcagccgcctgtttggcattaaaacgcgcaaactggaatgggtgggtatcgccattgggcttgccggaatcatcatgctcaatagcggtggaaatttaagcggcaatccgtggggcgcgattctgattttaatcggctcgattagctgggcgtttggctcggtttatggctcgcgcattaccttacctgtagggatgatggcgggtgcgattgagatgctggcggctggcgtggtgttaatgattgcgtcgatgattgcgggtgaaaaactgacggcgctcccttccctttcaggcttccttgcggtcggctatctggcgctgtttggttcgattatcgccattaacgcttatatgtatttaatccgcaacgtcagtccggctctcgccaccagctacgcctacgttaacccagtggtcgcggtcttgctgggtacgggactgggcggagagacgctgtcgaagattgaatggctggcgctcggcgtaattgtcttcgcggtggtactggtcacgttgggaaaatatctcttcccggcaaaacccgtagttgcgccagttattcnggatgcatcaagcgagtaa

SEQ ID NO: 6234 - protein, 306 aa, Escherichia coli
  misc_feature (301)..(301): Xaa can be any naturally occurring amino acid
MRFRQLLPLFGALFALYIIWGSTYFVIRIGVESWPPLMMAGVRFLAAGILLLAFLLLRGHKLPPLRPLLNAALIGLLLLAVGNGMVTVAEHQNVPSGIAAVVVATVPLFTLCFSRLFGIKTRKLEWVGIAIGLAGIIMLNSGGNLSGNPWGAILILIGSISWAFGSVYGSRITLPVGMMAGAIEMLAAGVVLMIASMIAGEKLTALPSLSGFLAVGYLALFGSIIAINAYMYLIRNVSPALATSYAYVNPVVAVLLGTGLGGETLSKIEWLALGVIVFAVVLVTLGKYLFPAKPVVAPVIXDASSE

SEQ ID NO: 6235 - DNA, 471 bp, Escherichia coli
  misc_feature (252)..(252): n is a, c, g or t
atggtcgacgttcacgataaggccacccgcagcaaaaatatgcgcgcgattgccacgcgtgatacggcgattgagaagcgcctcgccagtttgttaaccgggcagggccttgcgtttcgcgttcaggacgccagtctgcccggacgcccggattttgtcgttgatgaatatcgctgcgtgatatttacccacggctgcttctggcatcatcatcactgctatctgtttaaagtgcctgcgactcgaaccganttctggctggagaagataggtaaaaatgttgaacgcgatcgccgcgatatcagccatttgcaggaactcggttggcgcgtactgattgtctgggagtgtgcgttacgtgggcgcgagaagctgacggatgcggcgcttaccgagcgtctggaagagtggatctgcggcgaaggtgccagcgcgcagatcgacacgcaggggattcatttactcgcttga

SEQ ID NO: 6236 - protein, 156 aa, Escherichia coli
  misc_feature (84)..(84): Xaa can be any naturally occurring amino acid
MVDVHDKATRSKNMRAIATRDTAIEKRLASLLTGQGLAFRVQDASLPGRPDFVVDEYRCVIFTHGCFWHHHHCYLFKVPATRTXFWLEKIGKNVERDRRDISHLQELGWRVLIVWECALRGREKLTDAALTERLEEWICGEGASAQIDTQGIHLLA

SEQ ID NO: 6237 - DNA, 471 bp, Escherichia coli
  misc_feature (187)..(187): n is a, c, g or t
atggtcgacgttcacgataaggccacccgcagcaaaaatatgcgcgcgattgccacgcgtgatacggcgattgagaagcgcctcgccagtttgttaaccgggcagggccttgcgtttcgcgttcaggacgccagtctgcccggacgcccggattttgtcgttgatgaatatcgctgcgtgatatttncccacggctgcttctggcatcatcatcactgctatctgtttaaagtgcctgcgactcgaaccgagttctggctggagaagataggtaaaaatgttgaacgcgatcgccgcgatatcagccatttgcaggaactcggttggcgcgtactgattgtctgggagtgtgcgttacgtgggcgcgagaagctgacggatgcggcgcttaccgagcgtctggaagagtggatctgcggcgaaggtgccagcgcgcagatcgacacgcaggggattcatttactcgcttga

SEQ ID NO: 6238 - protein, 156 aa, Escherichia coli
  misc_feature (63)..(63): Xaa can be any naturally occurring amino acid
MVDVHDKATRSKNMRAIATRDTAIEKRLASLLTGQGLAFRVQDASLPGRPDFVVDEYRCVIFXHGCFWHHHHCYLFKVPATRTEFWLEKIGKNVERDRRDISHLQELGWRVLIVWECALRGREKLTDAALTERLEEWICGEGASAQIDTQGIHLLA

SEQ ID NO: 6239 - DNA, 471 bp, Citrobacter koseri
  misc_feature (160)..(160): n is a, c, g or t
atggtcgacgttcacgataaggccacccgcagcaaaaatatgcgcgcgattgccacgcgtgatacggcgattgagaagcgcctcgccagtttgttaaccgggcagggccttgcgtttcgcgttcaggacgccagtctgcccggacgcccggattttgtcnttgatgaatatcgctgcgtgatatttacccacggctgcttctggcatcatcatcactgctatctgtttaaagtgcctgcgactcgaaccgagttctggctggagaagataggtaaaaatgttgaacgcgatcgccgcgatatcagccatttgcaggaactcggttggcgcgtactgattgtctgggagtgtgcgttacgtgggcgcgagaagctgacggatgcggcgcttaccgagcgtctggaagagtggatctgcggcgaaggtgccagcgcgcagatcgacacgcaggggattcatttactcgcttga

SEQ ID NO: 6240 - protein, 156 aa, Citrobacter koseri
  misc_feature (54)..(54): Xaa can be any naturally occurring amino acid
MVDVHDKATRSKNMRAIATRDTAIEKRLASLLTGQGLAFRVQDASLPGRPDFVXDEYRCVIFTHGCFWHHHHCYLFKVPATRTEFWLEKIGKNVERDRRDISHLQELGWRVLIVWECALRGREKLTDAALTERLEEWICGEGASAQIDTQGIHLLA

SEQ ID NO: 6241 - DNA, 471 bp, Escherichia coli
  misc_feature (170)..(170): n is a, c, g or t
atggtcgacgttcacgataaggccacccgcagcaaaaatatgcgcgcgattgccacgcgtgatacggcgattgagaagcgcctcgccagtttgttaaccgggcagggccttgcgtttcgcgttcaggacgccagtctgcccggacgcccggattttgtcgttgatgaatntcgctgcgtgatatttacccacggctgcttctggcatcatcatcactgctatctgtttaaagtgcctgcgactcgaaccgagttctggctggagaagataggtaaaaatgttgaacgcgatcgccgcgatatcagccatttgcaggaactcggttggcgcgtactgattgtctgggagtgtgcgttacgtgggcgcgagaagctgacggatgcggcgcttaccgagcgtctggaagagtggatctgcggcgaaggtgccagcgcgcagatcgacacgcaggggattcatttactcgcttga

SEQ ID NO: 6242 - protein, 156 aa, Escherichia coli
  misc_feature (57)..(57): Xaa can be any naturally occurring amino acid
MVDVHDKATRSKNMRAIATRDTAIEKRLASLLTGQGLAFRVQDASLPGRPDFVVDEXRCVIFTHGCFWHHHHCYLFKVPATRTEFWLEKIGKNVERDRRDISHLQELGWRVLIVWECALRGREKLTDAALTERLEEWICGEGASAQIDTQGIHLLA

SEQ ID NO: 6243 - DNA, 1320 bp, Citrobacter koseri
  misc_feature (42)..(42): n is a, c, g or t
atgttgccgtttctgaaagcgccagctgacgcgccgttgatnagcgataaacaagaaattgatgcccgttaccgttactggcgtcgccatattctgctgaccatctggctgggttacgcgctgttttacttcacgcgtaaaagttttaacgccgccgtaccagaaatccttgctaacggcgtgctcagccgtagcgatatcggcctgttagcgaccctgttttacattacctacggcgtgtcgaagtttgtctccggcattgtcagcgaccgctcaaatgcccgttattttatggggatagggcttatcgccacgggcattatcaacattctgtttggcttctcgacgtcgctatgggcgtttgccgtgctctgggtgttgaacgcctttttccagggctggggttcaccggtgtgtgcgcgtctgttaaccgcctggtattctcgtaccgagcgcggcggttggtgggcattatggaacacggcgcataacgtcggcggcgcactcattcccattgtgatggcagcgagcgcgctgcattacggctggcgtgccgggatgatgattgcgggttgtatggcgatagtcgtggggatttttctctgctggcggctgcgcgatcgcccgcaggcgttaggtttaccggcggttggtgaatggcggcacgacgcactggagattgctcaacaacaagaaggggcagggctgacgcgtaaagagatcctcaccaaatatgtgttgctgaatccgtatatctggctgctttcgttttgctatgtgctggtctatgtggttcgggcggcgatcaacgactggggcaatttgtatatgtccgagacgctgggcgtcgatctggtcacggcgaatacggcagtgacaatgtttgaactgggcggatttattggtgcgctggtagcgggttggggttcggacaaactgtttaacggcaaccgcgggccgatgaatttgattttcgccgccggaattttgctttcagtcggctcgctgtggctgatgccatttgccagctacgtgatgcaggcaacctgcttcttcaccattggtttttttgtctttggcccgcagatgttaatcggcatggcggcggcagagtgttcccacaaagaggcggcaggggcggcgacgggatttgtcggcttgtttgcttatcttggtgcgtcgcttgctggttggccgctggcgaaagtactcgatacctggcactggagcggattttttgtggttatcgccatcgccgccgggatttccgcactgctattactgccctttttgaacgcccagacaccgcgagaagcgtga

SEQ ID NO: 6244 - protein, 439 aa, Citrobacter koseri
  misc_feature (14)..(14): Xaa can be any naturally occurring amino acid
MLPFLKAPADAPLXSDKQEIDARYRYWRRHILLTIWLGYALFYFTRKSFNAAVPEILANGVLSRSDIGLLATLFYITYGVSKFVSGIVSDRSNARYFMGIGLIATGIINILFGFSTSLWAFAVLWVLNAFFQGWGSPVCARLLTAWYSRTERGGWWALWNTAHNVGGALIPIVMAASALHYGWRAGMMIAGCMAIVVGIFLCWRLRDRPQALGLPAVGEWRHDALEIAQQQEGAGLTRKEILTKYVLLNPYIWLLSFCYVLVYVVRAAINDWGNLYMSETLGVDLVTANTAVTMFELGGFIGALVAGWGSDKLFNGNRGPMNLIFAAGILLSVGSLWLMPFASYVMQATCFFTIGFFVFGPQMLIGMAAAECSHKEAAGAATGFVGLFAYLGASLAGWPLAKVLDTWHWSGFFVVIAIAAGISALLLLPFLNAQTPREA

SEQ ID NO: 6245 - DNA, 1320 bp, Escherichia coli
  misc_feature (54)..(54): n is a, c, g or t
atgttgccgtttctgaaagcgccagctgacgcgccgttgattagcgataaacangaaattgatgcccgttaccgttactggcgtcgccatattctgctgaccatctggctgggttacgcgctgttttacttcacgcgtaaaagttttaacgccgccgtaccagaaatccttgctaacggcgtgctcagccgtagcgatatcggcctgttagcgaccctgttttacattacctacggcgtgtcgaagtttgtctccggcattgtcagcgaccgctcaaatgcccgttattttatggggatagggcttatcgccacgggcattatcaacattctgtttggcttctcgacgtcgctatgggcgtttgccgtgctctgggtgttgaacgcctttttccagggctggggttcaccggtgtgtgcgcgtctgttaaccgcctggtattctcgtaccgagcgcggcggttggtgggcattatggaacacggcgcataacgtcggcggcgcactcattcccattgtgatggcagcgagcgcgctgcattacggctggcgtgccgggatgatgattgcgggttgtatggcgatagtcgtggggatttttctctgctggcggctgcgcgatcgcccgcaggcgttaggtttaccggcggttggtgaatggcggcacgacgcactggagattgctcaacaacaagaaggggcagggctgacgcgtaaagagatcctcaccaaatatgtgttgctgaatccgtatatctggctgctttcgttttgctatgtgctggtctatgtggttcgggcggcgatcaacgactggggcaatttgtatatgtccgagacgctgggcgtcgatctggtcacggcgaatacggcagtgacaatgtttgaactgggcggatttattggtgcgctggtagcgggttggggttcggacaaactgtttaacggcaaccgcgggccgatgaatttgattttcgccgccggaattttgctttcagtcggctcgctgtggctgatgccatttgccagctacgtgatgcaggcaacctgcttcttcaccattggtttttttgtctttggcccgcagatgttaatcggcatggcggcggcagagtgttcccacaaagaggcggcaggggcggcgacgggatttgtcggcttgtttgcttatcttggtgcgtcgcttgctggttggccgctggcgaaagtactcgatacctggcactggagcggattttttgtggttatcgccatcgccgccgggatttccgcactgctattactgccctttttgaacgcccagacaccgcgagaagcgtga

SEQ ID NO: 6246 - protein, 439 aa, Escherichia coli
  misc_feature (18)..(18): Xaa can be any naturally occurring amino acid
MLPFLKAPADAPLISDKXEIDARYRYWRRHILLTIWLGYALFYFTRKSFNAAVPEILANGVLSRSDIGLLATLFYITYGVSKFVSGIVSDRSNARYFMGIGLIATGIINILFGFSTSLWAFAVLWVLNAFFQGWGSPVCARLLTAWYSRTERGGWWALWNTAHNVGGALIPIVMAASALHYGWRAGMMIAGCMAIVVGIFLCWRLRDRPQALGLPAVGEWRHDALEIAQQQEGAGLTRKEILTKYVLLNPYIWLLSFCYVLVYVVRAAINDWGNLYMSETLGVDLVTANTAVTMFELGGFIGALVAGWGSDKLFNGNRGPMNLIFAAGILLSVGSLWLMPFASYVMQATCFFTIGFFVFGPQMLIGMAAAECSHKEAAGAATGFVGLFAYLGASLAGWPLAKVLDTWHWSGFFVVIAIAAGISALLLLPFLNAQTPREA

SEQ ID NO: 6247 - DNA, 1320 bp, Escherichia coli
  misc_feature (44)..(44): n is a, c, g or t
atgttgccgtttctgaaagcgccagctgacgcgccgttgattancgataaacaagaaattgatgcccgttaccgttactggcgtcgccatattctgctgaccatctggctgggttacgcgctgttttacttcacgcgtaaaagttttaacgccgccgtaccagaaatccttgctaacggcgtgctcagccgtagcgatatcggcctgttagcgaccctgttttacattacctacggcgtgtcgaagtttgtctccggcattgtcagcgaccgctcaaatgcccgttattttatggggatagggcttatcgccacgggcattatcaacattctgtttggcttctcgacgtcgctatgggcgtttgccgtgctctgggtgttgaacgcctttttccagggctggggttcaccggtgtgtgcgcgtctgttaaccgcctggtattctcgtaccgagcgcggcggttggtgggcattatggaacacggcgcataacgtcggcggcgcactcattcccattgtgatggcagcgagcgcgctgcattacggctggcgtgccgggatgatgattgcgggttgtatggcgatagtcgtggggatttttctctgctggcggctgcgcgatcgcccgcaggcgttaggtttaccggcggttggtgaatggcggcacgacgcactggagattgctcaacaacaagaaggggcagggctgacgcgtaaagagatcctcaccaaatatgtgttgctgaatccgtatatctggctgctttcgttttgctatgtgctggtctatgtggttcgggcggcgatcaacgactggggcaatttgtatatgtccgagacgctgggcgtcgatctggtcacggcgaatacggcagtgacaatgtttgaactgggcggatttattggtgcgctggtagcgggttggggttcggacaaactgtttaacggcaaccgcgggccgatgaatttgattttcgccgccggaattttgctttcagtcggctcgctgtggctgatgccatttgccagctacgtgatgcaggcaacctgcttcttcaccattggtttttttgtctttggcccgcagatgttaatcggcatggcggcggcagagtgttcccacaaagaggcggcaggggcggcgacgggatttgtcggcttgtttgcttatcttggtgcgtcgcttgctggttggccgctggcgaaagtactcgatacctggcactggagcggattttttgtggttatcgccatcgccgccgggatttccgcactgctattactgccctttttgaacgcccagacaccgcgagaagcgtga

SEQ ID NO: 6248 - protein, 439 aa, Escherichia coli
  misc_feature (15)..(15): Xaa can be any naturally occurring amino acid
MLPFLKAPADAPLIXDKQEIDARYRYWRRHILLTIWLGYALFYFTRKSFNAAVPEILANGVLSRSDIGLLATLFYITYGVSKFVSGIVSDRSNARYFMGIGLIATGIINILFGFSTSLWAFAVLWVLNAFFQGWGSPVCARLLTAWYSRTERGGWWALWNTAHNVGGALIPIVMAASALHYGWRAGMMIAGCMAIVVGIFLCWRLRDRPQALGLPAVGEWRHDALEIAQQQEGAGLTRKEILTKYVLLNPYIWLLSFCYVLVYVVRAAINDWGNLYMSETLGVDLVTANTAVTMFELGGFIGALVAGWGSDKLFNGNRGPMNLIFAAGILLSVGSLWLMPFASYVMQATCFFTIGFFVFGPQMLIGMAAAECSHKEAAGAATGFVGLFAYLGASLAGWPLAKVLDTWHWSGFFVVIAIAAGISALLLLPFLNAQTPREA

SEQ ID NO: 6249 - DNA, 1332 bp, Escherichia coli
  misc_feature (1279)..(1279): n is a, c, g or t
atgatgtatcgcatcagaaattggttggtagcgacgttgctgctgctgtgcgcgccggtgggtgccgcgacgctctctgatattcaggtttctaacggtaatcaacaggcacggataacgttgagttttattggcgatcctgattatgcgtttagccatcaaagcaaacgcaccgtggcgctcgatatcaaacaaacgggggtaattcaggggctgccgttgttgtttagcggtaataacctggtgaaagcgattcgctccggaacgcctaaagatgcacaaacgctacggctggtggtcgatctcaccgaaaacggtaaaaccgaagcggtgaagcggcagaatggcagcaattacactgtcgtctttacgattaacgccgatgcgccgccatcgcctccgccaatggttgcgaaacgcgttgaaacgcctgcggttgtcgcaccgcgcgtcagcgaaccggcgcgcaatccgtttaaaacggaaagtaaccgcactacgggtgttatcagcagtaatacggtaacgcgtccggcagcccgcgcgacggctaacactggcgataaaattatcatcgctattgatgccggacacggcggtcaggaccctggcgctatcggccccggtggtacgcgggagaaaaatgtcaccatcgccatcgcgcgtaaattgcgtactttgctcaataacgatccgatgtttaagggcgttttaacccgtgacggggattactttatctcggtgatggggcgcagtgatgtggcacgtaagcaaaacgccaatttccttgtgtcgattcatgccgatgcagcaccgaaccgcagtgcgactggcgcttccgtatgggtgctctctaaccgtcgcgccaacagcgaaatggccagctggctggagcagcacgagaaacagtcggagctgctgggcggagcgggcgatgtgctggcgaacagtcagtctgacccctatttaagccaggcggtgctggatttacagttcggtcattcccagcgggtagggtatgatgtagcgaccagtatgatcagtcagttgcaacgcattggcgaaatacataaacgccgaccagaacacgcgagtctcggcgttctgcgttcgccggatattccgtcagtactggtcgaaaccggttttatcagtaacaacagcgaagaacgtttgctggcgagcgacgattaccaacaacagctggcagaagccatttacaaaggcctgcgcaattacttccttgcgcatccgatgcaatctgcgccgcagggtgcancggcacaaacggccagtacggtgacgacgccagatcgcacgctgccaaactaa

SEQ ID NO: 6250 - protein, 443 aa, Escherichia coli
  misc_feature (427)..(427): Xaa can be any naturally occurring amino acid
MMYRIRNWLVATLLLLCAPVGAATLSDIQVSNGNQQARITLSFIGDPDYAFSHQSKRTVALDIKQTGVIQGLPLLFSGNNLVKAIRSGTPKDAQTLRLVVDLTENGKTEAVKRQNGSNYTVVFTINADAPPSPPPMVAKRVETPAVVAPRVSEPARNPFKTESNRTTGVISSNTVTRPAARATANTGDKIIIAIDAGHGGQDPGAIGPGGTREKNVTIAIARKLRTLLNNDPMFKGVLTRDGDYFISVMGRSDVARKQNANFLVSIHADAAPNRSATGASVWVLSNRRANSEMASWLEQHEKQSELLGGAGDVLANSQSDPYLSQAVLDLQFGHSQRVGYDVATSMISQLQRIGEIHKRRPEHASLGVLRSPDIPSVLVETGFISNNSEERLLASDDYQQQLAEAIYKGLRNYFLAHPMQSAPQGAXAQTASTVTTPDRTLPN

SEQ ID NO: 6251 - DNA, 1848 bp, Citrobacter koseri
  misc_feature (847)..(847): n is a, c, g or t
atgccaattcaggtcttaccgccacaactggcgaaccagattgccgcaggtgaggtggtcgagcgacctgcgtcggtagtcaaagaactggtggaaaacagcctcgatgcaggtgcgacgcgtatcgatattgatatcgaacgcggtggggcgaaacttatccgcattcgtgataacggctgcggtatcaaaaaagatgagctggcgctggcgctggcgcgtcatgccaccagtaaaatcgcctctctggacgatctcgaagccattatcagtctgggctttcgcggtgaggcgctggcgagtatcagttcggtttcccgcctgacgctcacttcacgcaccgcagaacagcaggaagcctggcaggcctatgccgaagggcgcgatatggacgtgacggttaaaccggcggcgcatccggtgggaacgacgctggaggtgctggacctgttctacaacaccccggcgcggcgcaaattcctgcgcaccgagaaaaccgaatttaaccatatcgatgaaatcatccgccgcattgcgctggcgcgtttcgacgtcactatcaacctgtcgcataacggcaaaattgtacgccagtaccgcgcagtgccggaaggcgggcaaaaagaacggcgcttaggcgcgatttgcggcaccgcttttctcgaacaggcgctggcgattgaatggcaacacggcgatctcacgctgcgcggctgggtggccgatccaaatcacactacgcccgcactggcagaaattcagtattgctacgtgaacggtcgcatgatgcgcgatcgcctgatcaatcacgcgatccgccaggcctgcgaagacaaactgggggccnatcagcaaccggcatttgtgttgtatctggagatcgacccgcatcaggtggacgtcaacgtgcaccctgccaaacacgaagtgcgtttccatcagtcgcgtctggtgcatgactttatctatcagggcgtgctgagcgtgctacaacagcaactggaaacgccgctaccgctggacgatgaaccacaacctgcaccgcgtgccattccggaaaatcgcgtggcggctgggcgcaatcactttgctgaaccggcagttcgtgagccggtagctccgcgctactctcctgcgcccgcctcaggcagtcgtccggctgcctcctggccgaatgcgcagcctggttaccagaaacagcaaggtgaagtgtatcgccagcttttgcaaacgcccgctccgatgcaaaaaccaaaagcgccagaaccgcaggaacctgcacttgcggcgaacagtcagagttttggtcgggtactgactatcgtccattgcgactgtgcgttgcttgagcgcgatggcaacatttcacttttatccttgccagtggcagaacgttggctgcgtcaggcacaattgacgccgggtgaagtgccagtttgcgcccaaccgctgcttattccgttgcggctaaaagtttctggcgaagaaaaatcggcattagaaaaagcgcagtctgccctggcggaactgggtattgatttccagtccgatgcgcagcatgtgaccatcagggccgtgcctttacccttacgccaacaaaatttacaaatcttgattcctgaactgataggctacctggcgaagcagtccgtattcgaacctggaaatattgcgcagtggattgcacgaaatctgatgagcgaacatgcgcagtggtcaatggcacaggccataaccctgctggcggacgtggaacggttatgtccgcaacttgtgaaaacgccgccgggtggtctgttacaatctgttgatttacatccggcgataaaagccctgaaagatgagtga

SEQ ID NO: 6252 - protein, 615 aa, Citrobacter koseri
  misc_feature (283)..(283): Xaa can be any naturally occurring amino acid
MPIQVLPPQLANQIAAGEVVERPASVVKELVENSLDAGATRIDIDIERGGAKLIRIRDNGCGIKKDELALALARHATSKIASLDDLEAIISLGFRGEALASISSVSRLTLTSRTAEQQEAWQAYAEGRDMDVTVKPAAHPVGTTLEVLDLFYNTPARRKFLRTEKTEFNHIDEIIRRIALARFDVTINLSHNGKIVRQYRAVPEGGQKERRLGAICGTAFLEQALAIEWQHGDLTLRGWVADPNHTTPALAEIQYCYVNGRMMRDRLINHAIRQACEDKLGAXQQPAFVLYLEIDPHQVDVNVHPAKHEVRFHQSRLVHDFIYQGVLSVLQQQLETPLPLDDEPQPAPRAIPENRVAAGRNHFAEPAVREPVAPRYSPAPASGSRPAASWPNAQPGYQKQQGEVYRQLLQTPAPMQKPKAPEPQEPALAANSQSFGRVLTIVHCDCALLERDGNISLLSLPVAERWLRQAQLTPGEVPVCAQPLLIPLRLKVSGEEKSALEKAQSALAELGIDFQSDAQHVTIRAVPLPLRQQNLQILIPELIGYLAKQSVFEPGNIAQWIARNLMSEHAQWSMAQAITLLADVERLCPQLVKTPPGGLLQSVDLHPAIKALKDE

SEQ ID NO: 6253 - DNA, 660 bp, Escherichia coli
  misc_feature (506)..(506): n is a, c, g or t
atgtctggttttttccagcgtctgtttggcaaggataataagcctgctatcgctcgcggtccgttgggtctgcatctcaatagtggttttacgctcgatacgttagcgtttcgtttgctggaagatgcattgctgatcgagctaccgggtgaagaatataccgtggccgccgtcagttgcatcgaactgggcgggggtagccagattttccgttactacacttcgggcgatgagttcctgcaaatcaataccactggcggcgaagatattgatgacattgatgatatcaagctctttgtctatgaagagagctacggtatcagtaaagagagtcactggcgcgaggcgatcaacgccaaagcgatgggggcaatgaccttaaactggcaggaaaaacgctggcagcgattttttaacagcgaagaaccgggaaatatcgaacccgtctacatgctggaaaaagtagaaaatcaaaaccatgccaaatgggaagtgcataattttancatgggctaccaacggcaggtgaccgaagatacttacgaatatttgctgttaaatggtgaggaatcttttaacgatctcggcgagccggagtggttattttcgcgcgcgctgggtgtcgatatcccgatgacatcacttcatattattggttaa

SEQ ID NO: 6254 - protein, 219 aa, Escherichia coli
  misc_feature (169)..(169): Xaa can be any naturally occurring amino acid
MSGFFQRLFGKDNKPAIARGPLGLHLNSGFTLDTLAFRLLEDALLIELPGEEYTVAAVSCIELGGGSQIFRYYTSGDEFLQINTTGGEDIDDIDDIKLFVYEESYGISKESHWREAINAKAMGAMTLNWQEKRWQRFFNSEEPGNIEPVYMLEKVENQNHAKWEVHNFXMGYQRQVTEDTYEYLLLNGEESFNDLGEPEWLFSRALGVDIPMTSLHIIG

SEQ ID NO: 6255 - DNA, 1398 bp, Escherichia coli
  misc_feature (257)..(257): n is a, c, g or t
atggagatcctctacaacatctttaccgtgttttttaaccaggtcatgaccaatgccccgttgttgctgggtattgtgacctgtctgggttacatcctactgcgcaaaagtgtcagcgttattattaaaggtacgattaaaaccataattggtttcatgttgttgcaggcagggtccggcatcctgaccagcaccttcaaaccggtggtggcgaaaatgtccgaagtctacggcattaacggcgcaatttccgatanttacgcgtcgatgatggcaaccattgaacgcatgggcgatgcctatagctgggtgggttacgcggtgttgttagcgctggcgctgaacatctgttacgtgctgctgcgtcgcattaccggtattcgtaccatcatgctgactggtcacatcatgttccagcaggcggggctgattgccgttacgctgtttatcttcggctactccatgtggacgaccattatctgcaccgcgattctggtttcgctctactggggcattacctccaacatgatgtacaagccgacacaggaagtcaccgacggctgtggtttctccattggtcaccagcagcagttcgcatcatggattgcttataaagtcgcaccgttcctcggcaaaaaagaggaaagcgttgaagacctcaaactgcctggctggctgaatattttccacgacaacatcgtctccacggcgattgtcatgactatcttctttggtgccattctgctctcctttggtatcgacaccgtgcaggcgatggcaggcaaagtgaactggacggtgtacatcctgcaaaccggtttctcctttgcggtggcgattttcatcatcactcagggcgtgcgcatgtttgtggcggagctctctgaagcattcaacggtatctcccagcgcctgatcccgggtgcggttctggcgattgactgtgcggctatttatagcttcgcgccgaacgccgtggtctggggttttatgtggggcaccatcgggcaactgattgcggttggcatcctggtcgcctgtggctcttcaatcctgattattccaggctttatcccgatgttcttctccaacgccactatcggcgtgttcgctaaccacttcggcggctggcgcgcggcgctgaagatttgcctggtgatggggatgatcgaaatctttggttgcgtctgggcggtgaaactcaccggtatgagcgcctggatgggcatggcggactggtcgattctggcaccgccgatgatgcagggcttcttctccatcggtatcgcctttatggccgtcatcattgtcattgcactggcttatatgttcttcgctggccgcgcgctgcgcgcagaagaagatgcagaaaaacaactggcagaacagtctgcttaa

SEQ ID NO: 6256 - protein, 465 aa, Escherichia coli
  misc_feature (86)..(86): Xaa can be any naturally occurring amino acid
MEILYNIFTVFFNQVMTNAPLLLGIVTCLGYILLRKSVSVIIKGTIKTIIGFMLLQAGSGILTSTFKPVVAKMSEVYGINGAISDXYASMMATIERMGDAYSWVGYAVLLALALNICYVLLRRITGIRTIMLTGHIMFQQAGLIAVTLFIFGYSMWTTIICTAILVSLYWGITSNMMYKPTQEVTDGCGFSIGHQQQFASWIAYKVAPFLGKKEESVEDLKLPGWLNIFHDNIVSTAIVMTIFFGAILLSFGIDTVQAMAGKVNWTVYILQTGFSFAVAIFIITQGVRMFVAELSEAFNGISQRLIPGAVLAIDCAAIYSFAPNAVVWGFMWGTIGQLIAVGILVACGSSILIIPGFIPMFFSNATIGVFANHFGGWRAALKICLVMGMIEIFGCVWAVKLTGMSAWMGMADWSILAPPMMQGFFSIGIAFMAVIIVIALAYMFFAGRALRAEEDAEKQLAEQSA

SEQ ID NO: 6257 - DNA, 639 bp, Acinetobacter pittii
  misc_feature (488)..(488): n is a, c, g or t
atgcccgggcgctttgaactaaaaccaaccctggagaaagtctggcacgcgccggacaattttcgcttcatggacccgctgccgccgatgcatcgtcgggggatcattattgccgccattgtattggtagtcggatttctgcttccatctgatgatacgcccaacgcgccggtggtgacgcgtgaagcgcagttagatattcagtcgcaatcacaaccaccgacagaagaacagctgcgggcgcaattagtcacgccacaaaatgatcctgatcaggtggctccggtcgctccagaaccaatacaggaaggccaaccagaagagcagccgcaaaccacccatacgcaaccattccagccagatagcggaattgataatcaatggcgctcctatcgtgtcgaacccggtaaaacgatggcgcaactgttccgcgaccacggactgcccgctaccgatgtctatgccatggcgcaggtagaaggcgcggntaagccactgagtaatttgcaaaacgggcagatggtgaaaatccgccagaacgccagcggcgtggtgacgggcttaaccattgatacggggaataatcaacaggtcctgtttacccgccagccggatggcagttttattcgcgcgcggtag

SEQ ID NO: 6258 - protein, 212 aa, Acinetobacter pittii
  misc_feature (163)..(163): Xaa can be any naturally occurring amino acid
MPGRFELKPTLEKVWHAPDNFRFMDPLPPMHRRGIIIAAIVLVVGFLLPSDDTPNAPVVTREAQLDIQSQSQPPTEEQLRAQLVTPQNDPDQVAPVAPEPIQEGQPEEQPQTTHTQPFQPDSGIDNQWRSYRVEPGKTMAQLFRDHGLPATDVYAMAQVEGAXKPLSNLQNGQMVKIRQNASGVVTGLTIDTGNNQQVLFTRQPDGSFIRAR

SEQ ID NO: 6259 - DNA, 639 bp, Acinetobacter pittii
  misc_feature (342)..(342): n is a, c, g or t
atgcccgggcgctttgaactaaaaccaaccctggagaaagtctggcacgcgccggacaattttcgcttcatggacccgctgccgccgatgcatcgtcgggggatcattattgccgccattgtattggtagtcggatttctgcttccatctgatgatacgcccaacgcgccggtggtgacgcgtgaagcgcagttagatattcagtcgcaatcacaaccaccgacagaagaacagctgcgggcgcaattagtcacgccacaaaatgatcctgatcaggtggctccggtcgctccagaaccaatacaggaaggccaaccagaagagcagccgcaaaccacccanacgcaaccattccagccagatagcggaattgataatcaatggcgctcctatcgtgtcgaacccggtaaaacgatggcgcaactgttccgcgaccacggactgcccgctaccgatgtctatgccatggcgcaggtagaaggcgcggataagccactgagtaatttgcaaaacgggcagatggtgaaaatccgccagaacgccagcggcgtggtgacgggcttaaccattgatacggggaataatcaacaggtcctgtttacccgccagccggatggcagttttattcgcgcgcggtag

SEQ ID NO: 6260 - protein, 212 aa, Acinetobacter pittii
  misc_feature (114)..(114): Xaa can be any naturally occurring amino acid
MPGRFELKPTLEKVWHAPDNFRFMDPLPPMHRRGIIIAAIVLVVGFLLPSDDTPNAPVVTREAQLDIQSQSQPPTEEQLRAQLVTPQNDPDQVAPVAPEPIQEGQPEEQPQTTXTQPFQPDSGIDNQWRSYRVEPGKTMAQLFRDHGLPATDVYAMAQVEGADKPLSNLQNGQMVKIRQNASGVVTGLTIDTGNNQQVLFTRQPDGSFIRAR

SEQ ID NO: 6261 - DNA, 861 bp, Escherichia coli
  misc_feature (124)..(124): n is a, c, g or t
atgatcgctattactggtgccactggccaacttggtcactatgttattgaatccttgatgaaaacggttcctgccagccaaatagtggctatcgttcgtaatccggcaaaagcacaggtactgncagcacaaggcattaccgtgcgtcaggctgattacggcgatgaagccgcactgacatctgcgcttcagggagtggaaaaactactgctgatctcttccagcgaagtgggtcaacgtgccccgcagcatcgtaatgttattaatgccgcaaaggcggccgacgtgaaatttatcgcttataccagcctgctacatgccgattcctccccgctcggcctcgccgatgagcacatcgagacggagaaaatgctggctgattctggcatcgtttacaccctgctgcgcaacggctggtacaccgaaaactacctcgccagcgccccggcagcactggaacacggcgtatttatcggtgccgcgggcgatggcaaaatcgcctcagcaacgcgggctgattatgcggtagctgcggcacgcgtaattagcgaagccggtcacgaaggcaaggtttacgaactggcgggcgatagtgcctggacgctgacacagttagcggcagaactcaccaaacagagcagcaaaccgattacctatcaaaacctgagcgaagctgatttcgccgcggcgctgaaaagcgtcggtctgcctgatggactggcggatatgctggcggattctgacgttggcgcatcgaaaggcggtctgtttgatgacagcaaaacgcttagcaaattgattggccgcccaacgacaacgttagccgaaagcgtaagccatctttttaatgttaataactag

SEQ ID NO: 6262 - protein, 286 aa, Escherichia coli
  misc_feature (42)..(42): Xaa can be any naturally occurring amino acid
MIAITGATGQLGHYVIESLMKTVPASQIVAIVRNPAKAQVLXAQGITVRQADYGDEAALTSALQGVEKLLLISSSEVGQRAPQHRNVINAAKAADVKFIAYTSLLHADSSPLGLADEHIETEKMLADSGIVYTLLRNGWYTENYLASAPAALEHGVFIGAAGDGKIASATRADYAVAAARVISEAGHEGKVYELAGDSAWTLTQLAAELTKQSSKPITYQNLSEADFAAALKSVGLPDGLADMLADSDVGASKGGLFDDSKTLSKLIGRPTTTLAESVSHLFNVNN

SEQ ID NO: 6263 - DNA, 1344 bp, Citrobacter koseri
  misc_feature (480)..(480): n is a, c, g or t
atgttaaacagtattttagtcatactctgtttgatcgctgtaagtgcgttcttctcgatgtccgagatctcgcttgccgcctcacgcaaaatcaaacttaaactgctggctgatgaaggcaatataaatgcccaacgcgttctgaatatgcaggaaaatcccggcatgttctttaccgtggtccagatcggtctgaacgcagtggcgattctcggcggtatcgtcggtgatgcggcattttctccagcttttcacagcctgttctcccgctatatgtcggcagaactctctgagcaactgagctttattctctctttctcgttagtgactggcatgtttatcctgtttgcggatttaaccccgaaacgcatcggtatgattgcgccagaagctgtggctttgcgtatcatcaacccgatgcgcttctgcctgtacgtttgcaccccgctggtgtggttcttcaacggactggcgaacatnatcttccgtattttcaaactgccaatggtacgtaaagatgacatcacttctgatgatatctacgcggtagtggaagccggtgcgctggcgggcgtgttacgtaaacaggaacacgagctgattgaaaacgtctttgagctggaatcccgtaccgttccgtcttcaatgacaccgcgtgaaaacgtgatttggtttgatctccacgaagatgagcaaagtctgaagaataaggttgcggaacatccgcactctaagtttctcgtctgtaatgaagatattgaccacatcatcggctatgtcgattctaaagacctgctgaaccgcgtgctggctaaccaaagcctggcactgaacagcggcgtacaaattcgcaatacgctgattgtgccggatacgttaaccctttcagaggcgttggaaagttttaaaaccgcaggtgaagacttcgcggtgatcatgaacgagtacgcactggtagtggggatcatcaccctcaacgacgtgatgaccacgctgatgggcgatctggtcggtcaggggctggaagagcagattgtcgcccgtgatgagaactcatggctgatagacggcggcacgcctattgacgacgtcatgcgcgtgctggatattgacgagttcccgcagtcgggcaactacgaaaccatcggcggctttatgatgtttatgctgcgtaagatcccgaaacgcaccgattcggtgaaattcgccggctacaaatttgaagtggtggatatcgataactaccgcatcgaccagctgctggtgacccgaatcgacagcaaagccaccgccctttcgccaaaactgcctgacgctaaagataaagaagaaagcgtcgcgtaa

SEQ ID NO: 6264 - protein, 447 aa, Citrobacter koseri
  misc_feature (160)..(160): Xaa can be any naturally occurring amino acid
MLNSILVILCLIAVSAFFSMSEISLAASRKIKLKLLADEGNINAQRVLNMQENPGMFFTVVQIGLNAVAILGGIVGDAAFSPAFHSLFSRYMSAELSEQLSFILSFSLVTGMFILFADLTPKRIGMIAPEAVALRIINPMRFCLYVCTPLVWFFNGLANXIFRIFKLPMVRKDDITSDDIYAVVEAGALAGVLRKQEHELIENVFELESRTVPSSMTPRENVIWFDLHEDEQSLKNKVAEHPHSKFLVCNEDIDHIIGYVDSKDLLNRVLANQSLALNSGVQIRNTLIVPDTLTLSEALESFKTAGEDFAVIMNEYALVVGIITLNDVMTTLMGDLVGQGLEEQIVARDENSWLIDGGTPIDDVMRVLDIDEFPQSGNYETIGGFMMFMLRKIPKRTDSVKFAGYKFEVVDIDNYRIDQLLVTRIDSKATALSPKLPDAKDKEESVA

SEQ ID NO: 6265 - DNA, 1734 bp, Citrobacter koseri
  misc_feature (929)..(929): n is a, c, g or t
gtgcgctatatccgacagttatgctgtgtaagcttactctgcttaagcggatctgccgtcgccgcgaacgtccgtctacaggtcgaggggttatcgggagagctggaaaagaacgttcgcgcgcagctttctacgattgaaagtgatgaagtgacgccagaccgtcgctttcgcgcacgcgtcgatgatgccatccgcgaaggtctgaaagcgctgggctattaccagccgaccattgaatttgatctccgtccaccgccaaagaaagggcggcaggtattgatcgccaaagtcacgccaggcgtgccggtgttaattggcggcaccgatgtggtattgcgcggcggcgcgcggaccgataaagactatttgaaattgctcgatactcgcccggctattggtacggtactgaaccagggcgattatgaaaatttcaaaaagtccttaaccagcattgcgttgcgtaaaggctatttcgatagcgagtttactaaagcgcagctgggcattgcgctcggcctgcataaagccttctgggatattgattataacagtggcgaacgctaccgcttcgggcatgtgacctttgaaggatcacaaattcgtgacgaatacctgcaaaatctggtgccgttcaaagagggcgatgagtacgaatcgaaagatctggcggaactgaaccgccgactttctgctaccggctggtttaattcggtggtggtggcaccacaatttgataaagcgcgcgaaacgaaagtattaccgttgacgggcgtggtttcgccgcgcacagaaaacaccatcgaaaccggggtcggttactctacggacgtggggccacgagttaaggcgacgtggaaaaaaccatggatgaactcgtacggtcatagcctgaccaccagcaccagtatttctgcaccggagcaganccttgatttcagctataaaatgccgctgctgaagaatccgctggaacaatattatttggtgcagggcggttttaagcgcactgacctgaacgatactgagtctgactccactacgctggtggcttctcgctactgggatctctccagcggctggcagcgtgccattaacctgcgctggagtttcgaccactttacccagggtgaaattaccaacaccacgatgctgttttatcctggggtgatgattagccgcacgcgttctcgtggtggcctgatgccaacctggggcgactcgcaacgctactctatcgactactccaacacggcctggggctcggatgttgatttctccgttttccaggcgcagaacgtctggatccgcacactgtacgatcgccatcgttttgtgacacgcggcacgctgggctggattgaaacgggtgatttcgacaaagtaccgccggatctgcgtttcttcgccgggggcgatcgcagtattcgcggctacaaatacaaatctatcgccccgaaatacgccaacggtgacctgaaaggggcctcgaagctgataaccggatcgctggaataccagtacaacgtgaccggaaaatggtggggcgcggtgtttgtcgatagcggcgaagcggtaagcgatattcgccgcagcgactttaaaaccggtaccggtgtcggcgtgcgctgggaatcgccggtcgggccaatcaaactcgattttgccgtgccggtcgcggataaagacgaacacgggttacagttttacatcggtctggggccagaattatga

SEQ ID NO: 6266 - protein, 577 aa, Citrobacter koseri
  misc_feature (310)..(310): Xaa can be any naturally occurring amino acid
MRYIRQLCCVSLLCLSGSAVAANVRLQVEGLSGELEKNVRAQLSTIESDEVTPDRRFRARVDDAIREGLKALGYYQPTIEFDLRPPPKKGRQVLIAKVTPGVPVLIGGTDVVLRGGARTDKDYLKLLDTRPAIGTVLNQGDYENFKKSLTSIALRKGYFDSEFTKAQLGIALGLHKAFWDIDYNSGERYRFGHVTFEGSQIRDEYLQNLVPFKEGDEYESKDLAELNRRLSATGWFNSVVVAPQFDKARETKVLPLTGVVSPRTENTIETGVGYSTDVGPRVKATWKKPWMNSYGHSLTTSTSISAPEQXLDFSYKMPLLKNPLEQYYLVQGGFKRTDLNDTESDSTTLVASRYWDLSSGWQRAINLRWSFDHFTQGEITNTTMLFYPGVMISRTRSRGGLMPTWGDSQRYSIDYSNTAWGSDVDFSVFQAQNVWIRTLYDRHRFVTRGTLGWIETGDFDKVPPDLRFFAGGDRSIRGYKYKSIAPKYANGDLKGASKLITGSLEYQYNVTGKWWGAVFVDSGEAVSDIRRSDFKTGTGVGVRWESPVGPIKLDFAVPVADKDEHGLQFYIGLGPEL

SEQ ID NO: 6267 - DNA, 531 bp, Serratia fonticola
  misc_feature (319)..(319): n is a, c, g or t
atgagcttactcaacgtccctgcgggtaaagatctgccggaagacatctacgttgttattgagatcccggctaacgcagatccgatcaaatacgaaatcgacaaagagagcggcgcactgttcgttgaccgcttcatgtccaccgcgatgttctatccgtgcaactacggttacatcaaccacactctgtctctggacggtgacccggttgacgtactggtcccgactccgtacccgctgcagccgggttctgtgatccgctgccgtccggttggcgtactgaaaatgaccgacgaagccggtgaagatgcgaaactgnttgctgttccgcacaccaagctgagcaaagaatacgatcacattaaagacgttaacgatctgccagagctgctgaaagcgcaaatcgctcacttcttcgagcactacaaagacctcgaaaaaggcaagtgggttaaagttgaaggttgggaaaacgcagaagccgctaaagctgaaatcgttgcttccttcgagcgcgccaagaataaataa

SEQ ID NO: 6268 - protein, 176 aa, Serratia fonticola
  misc_feature (107)..(107): Xaa can be any naturally occurring amino acid
MSLLNVPAGKDLPEDIYVVIEIPANADPIKYEIDKESGALFVDRFMSTAMFYPCNYGYINHTLSLDGDPVDVLVPTPYPLQPGSVIRCRPVGVLKMTDEAGEDAKLXAVPHTKLSKEYDHIKDVNDLPELLKAQIAHFFEHYKDLEKGKWVKVEGWENAEAAKAEIVASFERAKNK

SEQ ID NO: 6269 - DNA, 726 bp, Escherichia coli
  misc_feature (516)..(516): n is a, c, g or t
gtgagtaataaaaacgtcaatgtaaggaaatcgcaggaaataacattctgcttgctggcaggtatcctgatgttcatggcaatgatggttgccggacgcgctgaagcgggagtggccttaggtgcgactcgcgtaatttatccggcagggcaaaaacaagtgcaacttgccgtgacaaataatgatgaaaatagcacctatttaattcaatcatgggtagaaaatgccgatggtgtaaaggatggccgttttatcgtgacgccacctctgtttgcgatgaagggaaaaaaagagaataccttgcgtattcttgatgcaacaaataaccaattgccacaggatcgggaaagtttattctggatgaatgttaaagcgattccgtcaatggataaatcaaaattgactgagaatacgctacagctcgcaattatcagccgcattaaactgtactatcgtccggctaaattagcgttgccacccgatcaggccgcagaaaaattaagatttcgtcgtagngcgaattctctgacgctgatcaacccgacaccctattacctgacggtaacagagttgaatgccggaactcgggttcttgaaaatgcattggtgcctccaatgggcgaaagcgcggttaaattgccttctgatgcaggaagcaatattacttaccgaacaataaatgattatggcgcacttacccccaaaatgacgggcgtaatggaataa

SEQ ID NO: 6270 - protein, 241 aa, Escherichia coli
  misc_feature (172)..(172): Xaa can be any naturally occurring amino acid
MSNKNVNVRKSQEITFCLLAGILMFMAMMVAGRAEAGVALGATRVIYPAGQKQVQLAVTNNDENSTYLIQSWVENADGVKDGRFIVTPPLFAMKGKKENTLRILDATNNQLPQDRESLFWMNVKAIPSMDKSKLTENTLQLAIISRIKLYYRPAKLALPPDQAAEKLRFRRXANSLTLINPTPYYLTVTELNAGTRVLENALVPPMGESAVKLPSDAGSNITYRTINDYGALTPKMTGVME

SEQ ID NO: 6271 - DNA, 2292 bp, Escherichia coli
  misc_feature (1773)..(1773): n is a, c, g or t
ttgtcagaactactctctttcgccctttttctcgcctctgtgctgatttacgcatggaaagcgggacgtaacacctggtggtttgcagccacattaacggtactggggctatttgtcgttttaaatatcaccctgtttgccagcgactattttactggcgatggtattaacgacgcggttctctataccttaaccaacagcctgaccggtgctggtgtcagcaaatacatcctgcctggtatcggcattgtgctggggctggcggcggtgttcggtgcgctgggctggatcctgcgccgtcgtcgccatcatccgcaccattttggttacagcctgctggcactcttactggcgctgggttcagtggatgccagcccggcatttcgtcagataacggaactggtgaaatcccagtcacgcgacggcgacccggactttgcggcttattataaagagccgtcgagaactatccctgacccgaaactcaacctggtttatatctacggcgaaagtctcgagcggacctattttgataacgaggctttcccggatctcacgcctgaactgggcgcgttgaaaaatgaaggcctggatttcagccacacgcagcagctgccgggaacggattacacgattgcgggcatggtagcttctcagtgcggcataccgctgtttgccccatttgaaggcaacgcctccgcctctgtctccagcttcttcccgcagaacatctgtctgggcgatattctgaaaaactcgggttatcagaactatttcgtgcagggcgcgaatctgcgttttgccggtaaagatgtgttcctgaaatcgcacggcttcgaccacttatacggctcagaagagctgaaaagcgtggtggccgacccgcactatcgcaacgactggggattctacgacgataccgttctcgatgaagcgtggaaaaaatttgaagagctttcccgctcaggtcagcgattctcactgtttaccctgacagtcgatacccatcacccggatggttttatctcgcgcacctgtaaccgcaaaaaatatgattttgacggtaagccgaatcagtcattcagcgcggtaagttgcagccaggagaatattgcgacgtttatcaacaaaatcaaagcgtcaccgtggtttaaagataccgtcatcgtcgtctcttctgaccatttagcgatgaacaatacggcgtggaaataccttaataagcaggatcgcaataacctgttttttgtcatccgtggcgacaagccgcagcaagagacgctggcagtgaagcgtaatacgatggataacggcgcgacggtgctggacattctcggtggcgataactatctcggacttggccgtagcagtttatccgggcagtcgatgtcggaaatcttcctcaatatcaaagagaaaacattggcgtggaagccggatatcatccgcctgtggaaattccctaaagagatgaaagagttcaccatcgaccagcagaaaaacatgattgccttctcaggtagccatttccgtttgccgctgctgttgcgggtttcagacaaacgcgtggaaccgctgccggaaagcgaatactcagcaccgctgcgtttccagctggcagatttcgctccacgcgacaatttcgtctgggttgaccgttgctacaagatggcacaactctgggctccggaactggcactctccaccgactggtgtgtctcgcaagggcagcttggcggtcagcaaattgttcagcatgttgacaaagcaatntggaagggcaaaacggcatttaaagatacggtcatcgacatggcgcgttacaaaggcaatgtcgatacgctaaagattgttgataacgatattcgctacaaagccgacagtttcatctttaacgtcgctggtgcgccagaagaggtgaaacagtttagcgggatttctcgtccagagtcgtggggccgctggtccaacgcacagctgggcgatgaagtaaaaatcgagtacaagcatccgctgccgaagaaatttgacctggtgattaccgccaaagcatacggcaataacgccagccgtcctattccggtacgcgtaggcaatgaagaacaaacccttgtgctgggcaatgaagtgaccaccaccacactgcatttcgataacccaaccgatgccgacacactggtaattgtgccgccggaacctgtctcaaccaacgaagggaatatcctcggacactcgccgcgtaagctcgggatcggcatggtggaaattaaagtggtagaacgtgaagggtaa

SEQ ID NO: 6272 - protein, 763 aa, Escherichia coli
  misc_feature (591)..(591): Xaa can be any naturally occurring amino acid
MSELLSFALFLASVLIYAWKAGRNTWWFAATLTVLGLFVVLNITLFASDYFTGDGINDAVLYTLTNSLTGAGVSKYILPGIGIVLGLAAVFGALGWILRRRRHHPHHFGYSLLALLLALGSVDASPAFRQITELVKSQSRDGDPDFAAYYKEPSRTIPDPKLNLVYIYGESLERTYFDNEAFPDLTPELGALKNEGLDFSHTQQLPGTDYTIAGMVASQCGIPLFAPFEGNASASVSSFFPQNICLGDILKNSGYQNYFVQGANLRFAGKDVFLKSHGFDHLYGSEELKSVVADPHYRNDWGFYDDTVLDEAWKKFEELSRSGQRFSLFTLTVDTHHPDGFISRTCNRKKYDFDGKPNQSFSAVSCSQENIATFINKIKASPWFKDTVIVVSSDHLAMNNTAWKYLNKQDRNNLFFVIRGDKPQQETLAVKRNTMDNGATVLDILGGDNYLGLGRSSLSGQSMSEIFLNIKEKTLAWKPDIIRLWKFPKEMKEFTIDQQKNMIAFSGSHFRLPLLLRVSDKRVEPLPESEYSAPLRFQLADFAPRDNFVWVDRCYKMAQLWAPELALSTDWCVSQGQLGGQQIVQHVDKAXWKGKTAFKDTVIDMARYKGNVDTLKIVDNDIRYKADSFIFNVAGAPEEVKQFSGISRPESWGRWSNAQLGDEVKIEYKHPLPKKFDLVITAKAYGNNASRPIPVRVGNEEQTLVLGNEVTTTTLHFDNPTDADTLVIVPPEPVSTNEGNILGHSPRKLGIGMVEIKVVEREG

SEQ ID NO: 6273 - DNA, 291 bp, Escherichia coli
  misc_feature (43)..(43): n is a, c, g or t
atgagtgccgtaacagttaatgatgacggtctggttttacggntctatattcagccgaaagccagccgtgattctattgtcggtttacatggcgacgaggtaaaagtcgccattaccgcgccgccggttgacggccaggccaacagccatctggtgaagtttctcggtaagcaattccgggttgccaaaagccaggtggtaattgaaaaaggcgaacttggccgccacaaacaaattaaaatcattaatccgcaacaaatcccgccagaaatcgcggcgttaattaattag

SEQ ID NO: 6274 - protein, 96 aa, Escherichia coli
  misc_feature (15)..(15): Xaa can be any naturally occurring amino acid
MSAVTVNDDGLVLRXYIQPKASRDSIVGLHGDEVKVAITAPPVDGQANSHLVKFLGKQFRVAKSQVVIEKGELGRHKQIKIINPQQIPPEIAALIN

SEQ ID NO: 6275 - DNA, 594 bp, Escherichia coli
  misc_feature (166)..(166): n is a, c, g or t
atgcaaaaagttgtcctcgcaactggcaatgccggtaaagtgcgtgagctggcgtcgctgcttagcgacttcggtcttgatatcgtggcccaaacagacctcggcgtagattccgctgaagaaaccggcctgacctttatcgaaaacgcgattctgaaagcgcgcnatgcggcaaaagtgaccggtttaccggcaattgccgacgactccggtctggcggtagatgcgctgggtggcgcgccgggtatttactccgcgcgttattccggtgaagacgcgaccgatcaaaagaatctgcaaaaactgctggaaacaatgaaagacgtaccggacgaccaacgtcaggcgcgtttccactgcgtgctggtatatctgcgtcacgcggaagatcccactccgctggtgtgccacggcagctggccgggcgtgattactcgtgaaccagcgggcactggtggctttggttatgatccaatcttcttcgtaccttccgaagggaaaactgctgccgaactgacccgcgaagaaaagagcgccatttcccaccgtggtcaggcgttgaaactgctgctggacgctttacgtaatggttaa

SEQ ID NO: 6276 - protein, 197 aa, Escherichia coli
  misc_feature (56)..(56): Xaa can be any naturally occurring amino acid
MQKVVLATGNAGKVRELASLLSDFGLDIVAQTDLGVDSAEETGLTFIENAILKARXAAKVTGLPAIADDSGLAVDALGGAPGIYSARYSGEDATDQKNLQKLLETMKDVPDDQRQARFHCVLVYLRHAEDPTPLVCHGSWPGVITREPAGTGGFGYDPIFFVPSEGKTAAELTREEKSAISHRGQALKLLLDALRNG

SEQ ID NO: 6277 - DNA, 1137 bp, Citrobacter pasteurii
  misc_feature (913)..(913): n is a, c, g or t
atggttaaattaccgccgctgagtctctacattcacatcccgtggtgcgtgcagaaatgcccgtactgcgatttcaactctcacgcgttgaaaggagaagtgccgcacgacgattatgttcagcatctgcttaacgatctgaacaacgatgtggcttacgctcagggccgtgaagtaaagacaatctttattggcggtggtacgccgagcctgctttccggcccggcgatgcaaacgctgctggacggcgtacgtgcgcgtttgccgctggcagcggatgcagaaattacgatggaagcgaatcctggtacggttgaagccgatcgctttgttgattatcagcgtgctggtgtgaaccgcatctccattggcgtacagagttttagcgaagaaaagctgaaacgacttgggcgcattcatggcccgcaagaagcgaaacgagcggcaaatctggcgagcggtttagggttacgtagctttaacctcgatttgatgcatgggctaccggatcaatcactggaagaggcgcttggcgatctacgccaggctattgaactgaatccgccgcatctttcctggtatcaactgaccatcgaacccaatacgctgtttggttcgcgccctcctgtactgccggacgatgacgcgctgtgggacattttcgaacaggggcatcagttattaaccgcagcgggttatcagcaatatgaaacttccgcttacgccaaacccggttatcagtgccagcacaatctcaactactggcgctttggtgactacatcggtattggctgcggcgcgcatggcaaagtgaccttcccggatgggcgcattctgcgtaccaccaaaacgcgtcatccacgtggttttatgcaggggcggtatctggaaagccagcgtgatgtcgaagccncagataaaccatttgagttctttatgaatcgcttccgtttgctggaacctgcgccgcgcgtggagtttagccagtatactggcctttcagaagaggttattcgccctcagttagacgaggctattgctcagggttatctcacagaatgtgcggattactggcagataacggaacatgggaagttgtttttaaattcgttgctggagctttttctggcggagtaa

SEQ ID NO: 6278 - protein, 378 aa, Citrobacter pasteurii
  misc_feature (305)..(305): Xaa can be any naturally occurring amino acid
MVKLPPLSLYIHIPWCVQKCPYCDFNSHALKGEVPHDDYVQHLLNDLNNDVAYAQGREVKTIFIGGGTPSLLSGPAMQTLLDGVRARLPLAADAEITMEANPGTVEADRFVDYQRAGVNRISIGVQSFSEEKLKRLGRIHGPQEAKRAANLASGLGLRSFNLDLMHGLPDQSLEEALGDLRQAIELNPPHLSWYQLTIEPNTLFGSRPPVLPDDDALWDIFEQGHQLLTAAGYQQYETSAYAKPGYQCQHNLNYWRFGDYIGIGCGAHGKVTFPDGRILRTTKTRHPRGFMQGRYLESQRDVEAXDKPFEFFMNRFRLLEPAPRVEFSQYTGLSEEVIRPQLDEAIAQGYLTECADYWQITEHGKLFLNSLLELFLAE

SEQ ID NO: 6279 - DNA, 1008 bp, Escherichia coli
  misc_feature (879)..(879): n is a, c, g or t
gtgaaaaagcaatggattgttggtacggcgctgtttatgttgatgactggtaatgtctgggcagatggtgaaccgccaactgaaaatatcttaaaagatcaattcaaaaagcagtatcacggcattctcaagcttgatgtcatcaccttaaaaaatcttgatgctaagggtaatcaggccacctggtcagcggaaggcgatgtctcttccagtgacgatctctatacctgggtcggtcagttggcagattacgagctgctcgaacagacctggacgaaagataaaccggtgaaattctcggcgatgttaaccagtaaaggaacgcccgcgtctggctggtcggtgaacttttactcttttcaggcggcagccagcgatcgtgggcgggtggttgacgatatcaaaacgaataataaatatctgatcgtgaatagcgaagatttcaattatcgctttagtcagcttgagtctgcgttgaataaccagaataactcgattcctgcactgaaaaaggatgtaaaagcgcttgataagcaaatggtggcggcgcagaaagcagcggatgcatattggggaaaagatgcaaacggtaagcaaatgacccgcgaagacgcctttaaaaaaattcaccaacagcgtgatgattttaataaacagaacgatagtgaggcgttcgcggttaaatatgacaaagaggtttatcaaccggcgattgcggcatgtcataaacagagtgaagagtgttatgaagtgccaattcagcagaaacgagattttgatatcaacgaacaacggcgacagacttttctgcaatcacaaaaacttagccgtaaattgcaggatgactggataacgctcgagaaagggcaatatccgttnacgatgaaagtttcagaaataaacagtaaaaaagtcgcgattttgatgaaaattgacgatatcaaccaggctaatgaacgctggaaaaaagataccgaacaactgcggcgcaatggggtgattaagtaa

SEQ ID NO: 6280 - protein, 335 aa, Escherichia coli
  misc_feature (293)..(293): Xaa can be any naturally occurring amino acid
MKKQWIVGTALFMLMTGNVWADGEPPTENILKDQFKKQYHGILKLDVITLKNLDAKGNQATWSAEGDVSSSDDLYTWVGQLADYELLEQTWTKDKPVKFSAMLTSKGTPASGWSVNFYSFQAAASDRGRVVDDIKTNNKYLIVNSEDFNYRFSQLESALNNQNNSIPALKKDVKALDKQMVAAQKAADAYWGKDANGKQMTREDAFKKIHQQRDDFNKQNDSEAFAVKYDKEVYQPAIAACHKQSEECYEVPIQQKRDFDINEQRRQTFLQSQKLSRKLQDDWITLEKGQYPXTMKVSEINSKKVAILMKIDDINQANERWKKDTEQLRRNGVIK

SEQ ID NO: 6281 - DNA, 768 bp, Escherichia coli
  misc_feature (692)..(692): n is a, c, g or t
atgagtcagccattattatctgttaacggcctgatgatgcgcttcggcggcctgctggcggtgaacaacgtcaatcttgaactgtacccgcaggagatcgtctcgttaatcggccctaacggtgccggaaaaaccacggtcttcaactgcctgaccggattctataaacccaccggcggcaccattttactgcgcgatcagcacctggaaggtttaccggggcagcaaattgcccgcatgggcgtgatgcgcaccttccagcatgtacgtctgttccgtgaaatgacggtgattgaaaacctgctggtggcacagcatcagcaactgaaaactgggctgttctccggcctgttgaaaaccccctctttccgtcgcgcccagagcgaagcgctcgaccgcgccgctacctggcttgagcgcattggtttgctggaacatgccaaccgtcaggcgagtaacctggcctatggtgaccagcgccgtctggagattgcccgctgtatggtgacgcagccggagattttaatgctcgacgaaccggcagcaggtcttaacccgaaagagacgaaagagctggatgagctgattgccgaactgcgtaaccatcacaacaccactatcttattgattgaacacgatatgaagctggtgatggggatttcagacagaatttacgtggtcaatcaggggangccgctggcaaacggtacaccggagcagatccgtaataacccggacgtgatccgtgcctatttaggtgaggcataa

SEQ ID NO: 6282 - protein, 255 aa, Escherichia coli
  misc_feature (231)..(231): Xaa can be any naturally occurring amino acid
MSQPLLSVNGLMMRFGGLLAVNNVNLELYPQEIVSLIGPNGAGKTTVFNCLTGFYKPTGGTILLRDQHLEGLPGQQIARMGVMRTFQHVRLFREMTVIENLLVAQHQQLKTGLFSGLLKTPSFRRAQSEALDRAATWLERIGLLEHANRQASNLAYGDQRRLEIARCMVTQPEILMLDEPAAGLNPKETKELDELIAELRNHHNTTILLIEHDMKLVMGISDRIYVVNQGXPLANGTPEQIRNNPDVIRAYLGEA

SEQ ID NO: 6283 - DNA, 273 bp, Escherichia coli
  misc_feature (260)..(260): n is a, c, g or t
atggctaacgatagctggagcgggcaggataaagctcaacactttatcgcctcggcgatgctttccgccgtcggaaatgaatattcacagcatcaggggatgagccgggatcgcagtgccatgtttggattgatgttctctgtcagtctgggggcgtcaaaagagctttgggatagccgccctgaggggagcggctggagctggaaggattttgcctgggatatcgccggtgcaagcaccggctataccgtctggcaacngacccgtcactaa

SEQ ID NO: 6284 - protein, 90 aa, Escherichia coli
  misc_feature (87)..(87): Xaa can be any naturally occurring amino acid
MANDSWSGQDKAQHFIASAMLSAVGNEYSQHQGMSRDRSAMFGLMFSVSLGASKELWDSRPEGSGWSWKDFAWDIAGASTGYTVWQXTRH

SEQ ID NO: 6285 - DNA, 702 bp, Escherichia coli
  misc_feature (415)..(415): n is a, c, g or t
gtgaaaaaactcatcacagcgaatgatattcgtgaagcacacgcgcgcggcgaactggcaatgttcgtggttctgcgcgccagcattattaccccggaagctcgtgaagtggctgatctgttgggttttaccatcaccgaatgtgatgaatcgatcccggtaacggcgtctgttcccgccagcgcatcagccgataaaaccgaaagccagcgcatccgtgaaaccattatcgcccaactgccggaaggtcagtttaccgaaagcctggtcgcgcagctgatggaaaaagtgatgaaggaaaaacagtcgctggaacagggtgcactgcagccgagctttaaatcggtgaccggcaaaggcggcatcaaagttattgatggcagcagcgtcaagtttggtcgtttcgacggcgcanaaccgcactgcgtaggcttgactgatctcgtgaccggagacgacggcagcagtatggccgctggtttcatgcagtgggagaacgccttctttccgtggaccctgaactacgacgaaatcgacatggtgctggaaggggagctgcatgttcgccacgaaggcgaaactatgatcgccaaagcgggcgatgtgatgtttatcccgaaaggctccagcatcgaatttggtacgacatccagcgtgaaatttctgtatgtcgcctggccggctaactggcaatccctatga

SEQ ID NO: 6286 - protein, 233 aa, Escherichia coli
  misc_feature (139)..(139): Xaa can be any naturally occurring amino acid
MKKLITANDIREAHARGELAMFVVLRASIITPEAREVADLLGFTITECDESIPVTASVPASASADKTESQRIRETIIAQLPEGQFTESLVAQLMEKVMKEKQSLEQGALQPSFKSVTGKGGIKVIDGSSVKFGRFDGAXPHCVGLTDLVTGDDGSSMAAGFMQWENAFFPWTLNYDEIDMVLEGELHVRHEGETMIAKAGDVMFIPKGSSIEFGTTSSVKFLYVAWPANWQSL

SEQ ID NO: 6287 - DNA, 765 bp, Escherichia coli
  misc_feature (491)..(491): n is a, c, g or t
atgaaaaaacatctttttactctgacactctcttctgtattggcgataccagcagtatcccatgcagaatttaaaggcggttttgctgatataggtattcattatcttgactggactagcagaaccactgagaaatcgtcgaccaaatcacacaaagatgattttggatatctggaactggaaggcggcgctaactttagttggggagaaatgtacgggttcttcgactgggaaaacttttataatgatcgtcatgataaaccgggtagcgagcagcgttatacatttaaaaataccaaccgtatttacctgggtgacaccggatttaatctctacttgcatgcgtatggcacctacggttctgcgaatcgtgtgaatttccatgacgatatgttcctttacgggatcggctacaatttcaccggcagcggttggtggttcaaaccgttctttgcaaaacgctatacagaccaaacctattataccggcgntaacggttatgtcgccggttgggttgcaggttacagctttatgctgggcagtgagaaattcaccctcaccaactggaacgagtacgagtttgatcgtgatgccacctacgcggcaggtaatggcggcaaagaaggtctgaacggtgccgtcgcactttggtggaatgcaacttcacacatcaccacagggattcagtatcgttatgcggatgacaaactgggcgaagatttttaccaggatgcgataatctactccatcaaatttaatttctga

SEQ ID NO: 6288 - protein, 254 aa, Escherichia coli
  misc_feature (164)..(164): Xaa can be any naturally occurring amino acid
MKKHLFTLTLSSVLAIPAVSHAEFKGGFADIGIHYLDWTSRTTEKSSTKSHKDDFGYLELEGGANFSWGEMYGFFDWENFYNDRHDKPGSEQRYTFKNTNRIYLGDTGFNLYLHAYGTYGSANRVNFHDDMFLYGIGYNFTGSGWWFKPFFAKRYTDQTYYTGXNGYVAGWVAGYSFMLGSEKFTLTNWNEYEFDRDATYAAGNGGKEGLNGAVALWWNATSHITTGIQYRYADDKLGEDFYQDAIIYSIKFNF

SEQ ID NO: 6289 - DNA, 765 bp, Escherichia coli
  misc_feature (607)..(607): n is a, c, g or t
atgaaaaaacatctttttactctgacactctcttctgtattggcgataccagcagtatcccatgcagaatttaaaggcggttttgctgatataggtattcattatcttgactggactagcagaaccactgagaaatcgtcgaccaaatcacacaaagatgattttggatatctggaactggaaggcggcgctaactttagttggggagaaatgtacgggttcttcgactgggaaaacttttataatgatcgtcatgataaaccgggtagcgagcagcgttatacatttaaaaataccaaccgtatttacctgggtgacaccggatttaatctctacttgcatgcgtatggcacctacggttctgcgaatcgtgtgaatttccatgacgatatgttcctttacgggatcggctacaatttcaccggcagcggttggtggttcaaaccgttctttgcaaaacgctatacagaccaaacctattataccggcgataacggttatgtcgccggttgggttgcaggttacagctttatgctgggcagtgagaaattcaccctcaccaactggaacgagtacgagtttgatcgtgatgccacctacgcggcangtaatggcggcaaagaaggtctgaacggtgccgtcgcactttggtggaatgcaacttcacacatcaccacagggattcagtatcgttatgcggatgacaaactgggcgaagatttttaccaggatgcgataatctactccatcaaatttaatttctga

SEQ ID NO: 6290 - protein, 254 aa, Escherichia coli
  misc_feature (203)..(203): Xaa can be any naturally occurring amino acid
MKKHLFTLTLSSVLAIPAVSHAEFKGGFADIGIHYLDWTSRTTEKSSTKSHKDDFGYLELEGGANFSWGEMYGFFDWENFYNDRHDKPGSEQRYTFKNTNRIYLGDTGFNLYLHAYGTYGSANRVNFHDDMFLYGIGYNFTGSGWWFKPFFAKRYTDQTYYTGDNGYVAGWVAGYSFMLGSEKFTLTNWNEYEFDRDATYAAXNGGKEGLNGAVALWWNATSHITTGIQYRYADDKLGEDFYQDAIIYSIKFNF

SEQ ID NO: 6291 - DNA, 690 bp, Escherichia coli
  misc_feature (398)..(398): n is a, c, g or t
atgcaacgggaaacggtctggttagtcgaagacgagcaagggatagccgatacgctggtctacatgttgcaacaggaaggttttgacgtcgaggtctttgagcgaggcttgccagtgctggataaagctcgccagcaggttcccgatgtcatgattctcgatgttggtttgcctgatatcagcggctttgaattgtgccgccagttactggcgctccatccggcgttacctgtactgttcctgacggcccgaagtgaagaggtcgatcgcctgcttgggctggaaattggcgctgacgactacgtggctaaaccgttttcacctcgcgaagtgtgcgccagagtgcgcaccttactgcgtcgggtgaagaagttctcgacgccgtctcccgttatccntattggtcattttgaattgaatgaacctgcggcgcagatcagctggtttgacacgccattaacgctgacgcggtatgagtttttattgctgaagacgttactcaagtcgccgggccgcgtctggtcccgccagcaactgatggatagcgtgtgggaagatgcgcaggacacctacgatcgcaccgtcgatacccacattaaaacgctgcgtgccaagctgcgcgccatcaaccccgatctttcaccgattaatactcatcgcggcatgggatatagcctgaggggcctgtaa

SEQ ID NO: 6292 - protein, 229 aa, Escherichia coli
  misc_feature (133)..(133): Xaa can be any naturally occurring amino acid
MQRETVWLVEDEQGIADTLVYMLQQEGFDVEVFERGLPVLDKARQQVPDVMILDVGLPDISGFELCRQLLALHPALPVLFLTARSEEVDRLLGLEIGADDYVAKPFSPREVCARVRTLLRRVKKFSTPSPVIXIGHFELNEPAAQISWFDTPLTLTRYEFLLLKTLLKSPGRVWSRQQLMDSVWEDAQDTYDRTVDTHIKTLRAKLRAINPDLSPINTHRGMGYSLRGL

SEQ ID NO: 6293 - DNA, 834 bp, Escherichia coli
  misc_feature (188)..(188): n is a, c, g or t
atggaatatcaacactggttacgtgaagcaataagccaacttcaggcgagcgaaagcccgcggcgtgatgctgaaatcctgctggagcatgttaccggcagagggcgtacttttattctcgcctttggtgaaacgcagctgactgacgaacaatgtcagcaacttgatgcgctactgacgcgtcgtcncgatggtgaacccattgctcatttaaccggggtgcgagaattctggtcgttgccgttatttgtttcgccagcgaccttaattccgcgcccggatacggagtgtctggtggagcaggcactggcgcggttgcctgaacaaccttgccgtattctcgatctcgggacgggtaccggggcgattgcgctggcgctggccagcgagcgtccggactgcgaaattaccgctgtagatcgtatgccagatgctgtctctctggcgcaacgtaatgcccagcatctggctatcaaaaatatccacattctgcaaagcgactggtttagcgcgctagccgggcagcagtttgcgatgattgtcagcaatccgccgtatattgacgagcaggacccacatcttcaacaaggcgatgtccgctttgagccgctcactgcgctggttgcggcagacagtggaatggcagacatcgtgcatatcatcgaacagtcgcgtaacgcgctggtatccggcggctttctgcttctggagcatggctggcagcagggtgaagcggtgcgacaggcatttatcttcgcggggtatcatgacgtcgaaacctgccgtgactatggggataacgagcgcgtaacgctcggccgctattatcaatga

SEQ ID NO: 6294 - protein, 277 aa, Escherichia coli
  misc_feature (63)..(63): Xaa can be any naturally occurring amino acid
MEYQHWLREAISQLQASESPRRDAEILLEHVTGRGRTFILAFGETQLTDEQCQQLDALLTRRXDGEPIAHLTGVREFWSLPLFVSPATLIPRPDTECLVEQALARLPEQPCRILDLGTGTGAIALALASERPDCEITAVDRMPDAVSLAQRNAQHLAIKNIHILQSDWFSALAGQQFAMIVSNPPYIDEQDPHLQQGDVRFEPLTALVAADSGMADIVHIIEQSRNALVSGGFLLLEHGWQQGEAVRQAFIFAGYHDVETCRDYGDNERVTLGRYYQ

SEQ ID NO: 6295 - DNA, 1299 bp, Escherichia coli
  misc_feature (47)..(47): n is a, c, g or t
atgcgagttgtcatactgggaagtggtgtggtaggcgttgccagcgnctggtacttaaatcaggcaggacatgaggtcaccgtcattgatcgggagccgggggccgccctggaaaccagtgccgcgaatgcagggcaaatctcccccggatatgctgcaccgtgggcggcaccaggtgtgcctttaaaagcgattaaatggatgttccagcgccatgcgccgctggcggttcgtctcgacggtacgcagttccagttgaaatggatgtggcaaatgttacgtaactgcgacaccagccactatatggaaaacaaagggcggatggtgcgtctggcggaatacagccgtgattgcctgaaagcattgcgcgccgaaaccaatattcagtatgaagggcgtcagggtgggacgctgcaactgttccgtaccgaacaacagtatgaaaacgcgacccgcgatatcgccgtgctggaagatgccggcgtaccgtatcagctgctggaatccagccgcctggcggaagtggagcccgcgctggcagaagtggcgcacaaactgacgggcggcctgcaactgcccaatgatgaaaccggagactgccagctgtttacccagaatctggcgcggatggcggagcaggcgggggttaaattccgctttaatacgcccgttgaccaactgctttgcgacggcgagcaaatctacggcgtgaagtgtggtgatgaagtgattaaggccgatgcgtatgtgatggcgtttggttcttactcgacggcgatgctcaaaggcattgttgatattccggtgtatccgctgaaaggctactcgctgactattccgattgcgcaggaagatggtgcgccggtgtctactatccttgatgaaacctacaaaatcgccattacccgtttcgataaccgcattcgtgttggcggaatggcggaaattgttggctttaacaccgagctgttgcaaccgcgtcgtgaaacgctggagatggtggttcgcgatctctatccacgcggcggtcatgttgagcaggcgactttttggactggcctgcgcccgatgacgccagacggcacgccggttgtcgggcgtacacgctttaaaaatctgtggctgaataccggtcacggcacgctcggctggacgatggcttgcggttccggtcagttgttaagcgatctgctctcggggcgcacgccagcgatcccgtatgaagatctaagcgtagcgcgctacagccgtggatttacgccattacgcccgggccatttacatggcgcacacagctaa

SEQ ID NO: 6296 - protein, 432 aa, Escherichia coli
  misc_feature (16)..(16): Xaa can be any naturally occurring amino acid
MRVVILGSGVVGVASXWYLNQAGHEVTVIDREPGAALETSAANAGQISPGYAAPWAAPGVPLKAIKWMFQRHAPLAVRLDGTQFQLKWMWQMLRNCDTSHYMENKGRMVRLAEYSRDCLKALRAETNIQYEGRQGGTLQLFRTEQQYENATRDIAVLEDAGVPYQLLESSRLAEVEPALAEVAHKLTGGLQLPNDETGDCQLFTQNLARMAEQAGVKFRFNTPVDQLLCDGEQIYGVKCGDEVIKADAYVMAFGSYSTAMLKGIVDIPVYPLKGYSLTIPIAQEDGAPVSTILDETYKIAITRFDNRIRVGGMAEIVGFNTELLQPRRETLEMVVRDLYPRGGHVEQATFWTGLRPMTPDGTPVVGRTRFKNLWLNTGHGTLGWTMACGSGQLLSDLLSGRTPAIPYEDLSVARYSRGFTPLRPGHLHGAHS

SEQ ID NO: 6297 - DNA, 1431 bp, Escherichia coli
  misc_feature (601)..(601): n is a, c, g or t
atgatacgtaagtcagctacaggtgccattgttgcgttagccgtaatctggggtggtggcacatggtacacaggtacgcaaattcagcctggtgtcgaaaagtttattaaaggttttaacgatgctaaaaagaaaggtgaacatgcctacgatatgacgttaagttataaaaattttgacaaaggcttttttaattcccgttttcaaatgcaaatgacatttgataacggtgcacccgatctcaatatcaagccaggccagaaaattgtatttgatgtggatgttgagcacggtccgttgcccatcacaatgttaatgcatggtaatgtcatcccagcactggcagcggcaaaagtgaacttagtgaataatgagctgacacaaccgctatttatcgccgcgaaaaataaatcgcccgtggaagcgacattgcgattcgcgtttggtggcccattctccacgacattagatgttgcccctgcagagtatggaaagttttcttttggtgaaggccagtttacttttaatggtgatgatagttcattgtctaacctggatattgaaggcaaagtcgaagatattgttctgcaattttcaccantgaacaaagtaacggcgaaaagttttaccattgattctctgacacgattagaagaaaagaaatttccggttggtgaaagcgagtcgaaatttaatcaggttaatattatcaaccagggggaagtcgttgcccaaatcgatgctttcgttgcaaaaaccaggctggatcgcgttaaagacaaagattatatcaatgtcaatctgacctacgaacttgataagttaacaaaagggaatcagcaactcggtagtggtgagtggtcattgattgctgaatctattgatccctcagcggtgcgccaatttatcatccagtataacattgcgatgcagaagcagcttgctgcacaccctgagttagcaaacgatgaagttgctctgcaagaagtgaatgctgcattgttcaaagagtatttaccgttattacaaaaaagtgagccgaccattaaacaaccagtaagatggaagaacgcactcggcgaactaaatgccaatctggatatcagtattgccgaccccgccaaatcttcatcatccacaaacaaagatattaaatcgctcaattttgatatgaagttaccgcttaatgtcgccacagaaaccgcaaaacagcttaatttatctgaagggatggatgcggaaaaagcgcaaaagcgggctgataaacaaatcagcgggatgatgacattaggtcagatgttgcagttaatcacgattgacaacaataccgcctcgctgcaactgcgttatacaccgggtaaagttttttttaacggtcaggagatgagcgaagaagaatttatgtctcgtgccggacgttttgttcattaa

SEQ ID NO: 6298 - protein, 476 aa, Escherichia coli
  misc_feature (201)..(201): Xaa can be any naturally occurring amino acid
MIRKSATGAIVALAVIWGGGTWYTGTQIQPGVEKFIKGFNDAKKKGEHAYDMTLSYKNFDKGFFNSRFQMQMTFDNGAPDLNIKPGQKIVFDVDVEHGPLPITMLMHGNVIPALAAAKVNLVNNELTQPLFIAAKNKSPVEATLRFAFGGPFSTTLDVAPAEYGKFSFGEGQFTFNGDDSSLSNLDIEGKVEDIVLQFSPXNKVTAKSFTIDSLTRLEEKKFPVGESESKFNQVNIINQGEVVAQIDAFVAKTRLDRVKDKDYINVNLTYELDKLTKGNQQLGSGEWSLIAESIDPSAVRQFIIQYNIAMQKQLAAHPELANDEVALQEVNAALFKEYLPLLQKSEPTIKQPVRWKNALGELNANLDISIADPAKSSSSTNKDIKSLNFDMKLPLNVATETAKQLNLSEGMDAEKAQKRADKQISGMMTLGQMLQLITIDNNTASLQLRYTPGKVFFNGQEMSEEEFMSRAGRFVH

SEQ ID NO: 6299 - DNA, 1431 bp, Escherichia coli
  misc_feature (589)..(589): n is a, c, g or t
atgatacgtaagtcagctacaggtgccattgttgcgttagccgtaatctggggtggtggcacatggtacacaggtacgcaaattcagcctggtgtcgaaaagtttattaaaggttttaacgatgctaaaaagaaaggtgaacatgcctacgatatgacgttaagttataaaaattttgacaaaggcttttttaattcccgttttcaaatgcaaatgacatttgataacggtgcacccgatctcaatatcaagccaggccagaaaattgtatttgatgtggatgttgagcacggtccgttgcccatcacaatgttaatgcatggtaatgtcatcccagcactggcagcggcaaaagtgaacttagtgaataatgagctgacacaaccgctatttatcgccgcgaaaaataaatcgcccgtggaagcgacattgcgattcgcgtttggtggcccattctccacgacattagatgttgcccctgcagagtatggaaagttttcttttggtgaaggccagtttacttttaatggtgatgatagttcattgtctaacctggatattgaaggcaaagtcgaagatattgttctgnaattttcaccaatgaacaaagtaacggcgaaaagttttaccattgattctctgacacgattagaagaaaagaaatttccggttggtgaaagcgagtcgaaatttaatcaggttaatattatcaaccagggggaagtcgttgcccaaatcgatgctttcgttgcaaaaaccaggctggatcgcgttaaagacaaagattatatcaatgtcaatctgacctacgaacttgataagttaacaaaagggaatcagcaactcggtagtggtgagtggtcattgattgctgaatctattgatccctcagcggtgcgccaatttatcatccagtataacattgcgatgcagaagcagcttgctgcacaccctgagttagcaaacgatgaagttgctctgcaagaagtgaatgctgcattgttcaaagagtatttaccgttattacaaaaaagtgagccgaccattaaacaaccagtaagatggaagaacgcactcggcgaactaaatgccaatctggatatcagtattgccgaccccgccaaatcttcatcatccacaaacaaagatattaaatcgctcaattttgatatgaagttaccgcttaatgtcgccacagaaaccgcaaaacagcttaatttatctgaagggatggatgcggaaaaagcgcaaaagcgggctgataaacaaatcagcgggatgatgacattaggtcagatgttgcagttaatcacgattgacaacaataccgcctcgctgcaactgcgttatacaccgggtaaagttttttttaacggtcaggagatgagcgaagaagaatttatgtctcgtgccggacgttttgttcattaa

SEQ ID NO: 6300 - protein, 476 aa, Escherichia coli
  misc_feature (197)..(197): Xaa can be any naturally occurring amino acid
MIRKSATGAIVALAVIWGGGTWYTGTQIQPGVEKFIKGFNDAKKKGEHAYDMTLSYKNFDKGFFNSRFQMQMTFDNGAPDLNIKPGQKIVFDVDVEHGPLPITMLMHGNVIPALAAAKVNLVNNELTQPLFIAAKNKSPVEATLRFAFGGPFSTTLDVAPAEYGKFSFGEGQFTFNGDDSSLSNLDIEGKVEDIVLXFSPMNKVTAKSFTIDSLTRLEEKKFPVGESESKFNQVNIINQGEVVAQIDAFVAKTRLDRVKDKDYINVNLTYELDKLTKGNQQLGSGEWSLIAESIDPSAVRQFIIQYNIAMQKQLAAHPELANDEVALQEVNAALFKEYLPLLQKSEPTIKQPVRWKNALGELNANLDISIADPAKSSSSTNKDIKSLNFDMKLPLNVATETAKQLNLSEGMDAEKAQKRADKQISGMMTLGQMLQLITIDNNTASLQLRYTPGKVFFNGQEMSEEEFMSRAGRFVH

SEQ ID NO: 6301 - DNA, 723 bp, Acinetobacter pittii
  misc_feature (155)..(155): n is a, c, g or t
atgggtaaaacccagcccttgccaatattaattactggcggaggtcgccgcatcggcctcgccctcgcatggcatttcattaatcaaaagcaaccggtgattgtcagctatcggacgcactatcccgccattgatggactgattaaagcaggtgngcagtgtattcaggctgatttttcgaccaacgacggtgtgatggcgtttgccgatgaagtactaaaaagcacccatggtctgcgtgctattttgcataacgccagcgcgtggatggcggaaaaaccgggtgcgccactgaccgacgtactggcttgcatgatgcagatccacgttaataccccatacctgctcaaccatgctctggaaagattactgcgtgggcacggacacgccgccagcgatatcattcactttaccgattatgtggtggagcgcagtagcgacaaacatattgcctatgctgcaagcaaagcggcactggataatatgacccgctcgtttgcccgcaagctggcaccggaagtgaaagtgaattctattgcgccatcgctgatcctgtttaatgaacatgatgatgccgaatatcgacaacaggcgctgaataaatcactgatgaaaaccgcgcctggcgagaaagaagtgatcgacctggtcgattacttacttaccagctgctttgtcaccggacgcagtctcccacttgatggcggtcgtcatctgcgttaa

SEQ ID NO: 6302 - protein, 240 aa, Acinetobacter pittii
  misc_feature (52)..(52): Xaa can be any naturally occurring amino acid
MGKTQPLPILITGGGRRIGLALAWHFINQKQPVIVSYRTHYPAIDGLIKAGXQCIQADFSTNDGVMAFADEVLKSTHGLRAILHNASAWMAEKPGAPLTDVLACMMQIHVNTPYLLNHALERLLRGHGHAASDIIHFTDYVVERSSDKHIAYAASKAALDNMTRSFARKLAPEVKVNSIAPSLILFNEHDDAEYRQQALNKSLMKTAPGEKEVIDLVDYLLTSCFVTGRSLPLDGGRHLR

SEQ ID NO: 6303 - DNA, 789 bp, Citrobacter koseri
  misc_feature (85)..(85): n is a, c, g or t
atgaaaatcggcacacagaatcaggcgttctttccagaaaacattctggagaaatttcgttatatcaaagagatgggcttcgatngttttgagattgacggcaaactgctggtcaacaatatagaagaagtcaaagcggcaatcaaagaaaccggcttaccggtgaccaccgcctgcggcggctatgacggctggattggcgactttatcgaagagcgtcgtcttaatggcttaaagcagatcgaacgcattcttgaagcgctggccgaagtgggcggtaaaggtatcgtcgttcctgctgcatggggcatgtttaccttccgtttaccgccgatgacctcgccgcgtagcctggacggcgaccgcaaaatggtgagtgattccctgcgcgtactggagcaggtggcagcgcgtaccggaaccgtggtgtatctcgaaccgttaaaccgttatcaggatcacatgatcaacaccctcgccgatgcccgccgttacatcgtcgaaaacgatcttaaacatgtacagattatcggcgatttctatcacatgaatatcgaagaagataacctggcgcaggcgttgcacgacaaccgcgacttgctcggtcatgtgcatattgccgataaccatcgctaccagccgggcagcggcaccctcgatttccacgcgctgtttgaacagctgcgcgccgataactatcagggctatgtggtgtatgaagggcgtatccgggcagaaaatcctgcccaggcgtaccgtgattcgttggcctggttgcgcacctgctaa

SEQ ID NO: 6304 - protein, 262 aa, Citrobacter koseri
  misc_feature (29)..(29): Xaa can be any naturally occurring amino acid
MKIGTQNQAFFPENILEKFRYIKEMGFDXFEIDGKLLVNNIEEVKAAIKETGLPVTTACGGYDGWIGDFIEERRLNGLKQIERILEALAEVGGKGIVVPAAWGMFTFRLPPMTSPRSLDGDRKMVSDSLRVLEQVAARTGTVVYLEPLNRYQDHMINTLADARRYIVENDLKHVQIIGDFYHMNIEEDNLAQALHDNRDLLGHVHIADNHRYQPGSGTLDFHALFEQLRADNYQGYVVYEGRIRAENPAQAYRDSLAWLRTC

SEQ ID NO: 6305 - DNA, 1398 bp, Escherichia coli
  misc_feature (594)..(594): n is a, c, g or t
atgaagcgacttaaaaatgaactcaatgcgctggtgaatcggggtgtcgacagacatctgcgcctcgctgtaaccggacttagccgcagcggcaaaacagcgtttatcaccgcgatggttaatcagttgctcaatattcatgccggagcacgtttgccgcttttaagtgcggtgcgtgaagagcgcctgctgggcgtaaaacgcattcctcagcgtgactttggcattccgcgcttcacctatgatgaaggactggcgcagttatatggcgatcctcccgcctggccgacgccaacgcgcggcgtcagcgaaattcgcctggcgctacgctataaatcgaacgattcgctgctgcgccactttaaggatacctccacgctgtatctggagattgtggattaccccggcgaatggttgctcgacctgccgatgctggcgcaggactatttaagctggtcgcgccagatgacgggcttactcaatggtcagcgcggcgaatggtcggcgaaatggcgaatgatgtgcgaagggctggacccgctagcgcctgccgacgaaaaccgactggcagacattgccgccgcgtggaccgantatctccaccactgcaaacagcaggggcagcactttattcagccaggacgctttgttttgcctggcgatatggcaggagcgcccgcgctgcaattcttcccatggccagatgtcgatgcctggggcgagtctaaactggcgcaggccgataaacacaccaacgccggaatgttgcgcgagcgttttaattattactgcgagaaggtggtgaaaggattctataaaaatcacttcctgcgttttgaccgccagattgtgctggtggactgcctgcaaccgctcaacagtggaccacaggcatttaatgatatgcgtctggcgctgacgcagctgatgcaaagtttccactacgggcagcgtaccctgttccggcgtttgttttcgccggttatcgataagctattgtttgctgccactaaagcggaccatgtgaccatcgatcagcacgctaatatggtttcattgctgcaacaactgattcaggatgcctggcaaaatgcggcgttcgaagggatcagtatggactgcctggggctggcgtctgttcaggcgaccaccagcggaattattgatgttaacggtgagaaaatcccggcgctgcgcggtaatcgactcagcgatggcgcaccgctcactgtttatcctggcgaagttcccgcacgtttgccaggtcaggcgttctgggataagcaaggcttccagtttgaggcgtttcgtccgcaggtgatggatgtcgacaaaccgctaccgcatattcgtcttgatgctgcgctggaatttttaataggagataaattgcgatga

SEQ ID NO: 6306 - protein, 465 aa, Escherichia coli
  misc_feature (198)..(198): Xaa can be any naturally occurring amino acid
MKRLKNELNALVNRGVDRHLRLAVTGLSRSGKTAFITAMVNQLLNIHAGARLPLLSAVREERLLGVKRIPQRDFGIPRFTYDEGLAQLYGDPPAWPTPTRGVSEIRLALRYKSNDSLLRHFKDTSTLYLEIVDYPGEWLLDLPMLAQDYLSWSRQMTGLLNGQRGEWSAKWRMMCEGLDPLAPADENRLADIAAAWTXYLHHCKQQGQHFIQPGRFVLPGDMAGAPALQFFPWPDVDAWGESKLAQADKHTNAGMLRERFNYYCEKVVKGFYKNHFLRFDRQIVLVDCLQPLNSGPQAFNDMRLALTQLMQSFHYGQRTLFRRLFSPVIDKLLFAATKADHVTIDQHANMVSLLQQLIQDAWQNAAFEGISMDCLGLASVQATTSGIIDVNGEKIPALRGNRLSDGAPLTVYPGEVPARLPGQAFWDKQGFQFEAFRPQVMDVDKPLPHIRLDAALEFLIGDKLR

SEQ ID NO: 6307 - DNA, 1614 bp, Enterobacter cloacae
  misc_feature (32)..(32): n is a, c, g or t
atgaagcactctgtttcagtcacgtgttgtgngctgttggtcagcagcatttctctttcgtatgctgctgaagttccgagcggcacagtactggcagagaagcaggagctggtgcgccacattaaagatgagccagcgtcgctggatcccgctaaagccgtgggcctgccggagattcaggtcattcgcgatctgtttgaaggactggtgaatcagaacgagaaaggggagattgtccccggcgttgcgactcagtggaaaagtaatgacaaccgtatatggacttttaccctgcgcgataacgcaaaatgggcggatggcacaccggtaacggcgcaagattttgtctacagctggcaacgtctggtggacccgaaaacgctatcgccatttgcatggtttgccgcgctggcgggaatcaacaacgcacaggcgattattgatgataaagccgcgcctgaccagcttggcgttaccgcagttgatgcccatactttgaaaatccagcttgataaaccgttgccgtggtttgtgaatttaaccgctaactttgccttcttcccggtgcaaaaagccaacgtagaaagcagtaaagagtggacgaaacccggaaatctgatcggcaatggcgcttatgttcttaaagagcgcgtagtcaatgaaaaactggtcgtggtgccgaatacccattattgggataacgccaaaacggtactgcaaaaagtgaccttcctgccaattaatcaggaatccgcagccactaagcgttatctcgcgggggatattgatatcaccgaatccttcccgaaaaatatgtatcagaagctgttgaaggatattccggggcaggtttatacgccgccgcagctcgggacctattattatgcgtttaacacgcaaaaagggccgacggcagatcagcgcgttcgcctggcattaagtatgacgatagatcgccgcctgatgaccgaaaaagtgttggggacgggcgaaaagccagcgtggcattttacaccagatgttaccgcgggatttacgccggaaccttcgccgtttgaacaaatgagtcaggaagaactgaatgcgcaggcaaaaactttgttgagcgcagctggttatggtccgcaaaaaccgctgaagttgacgcttttgtataacacttcagaaaaccatcaaaaaattgcgattgctgtagcatcgatgtggaaaaagaacctgggcgtagatgttaaattgcaaaaccaggaatggaaaacctatatcgatagccgtaataccggcaattttgatgttatccgcgcctcgtgggtaggggattataatgaaccctccactttcctgacattattaacgtcaacgcattccgggaatatttcacgctttaacaatccggcatatgacaaagttctggcccaggcatcgacggaaaataccgttaaagcgcgtaatgccgattacaacgcggcagaaaaaatcctcatggagcaagcaccgattgcaccaatttatcaatataccaatggacgattaatcaagccgtggctgaaaggttatcccattaataaccctgaagatgtggcgtacagtcggactatgtatattgtgaagcattga

SEQ ID NO: 6308 - protein, 537 aa, Enterobacter cloacae
  misc_feature (11)..(11): Xaa can be any naturally occurring amino acid
MKHSVSVTCCXLLVSSISLSYAAEVPSGTVLAEKQELVRHIKDEPASLDPAKAVGLPEIQVIRDLFEGLVNQNEKGEIVPGVATQWKSNDNRIWTFTLRDNAKWADGTPVTAQDFVYSWQRLVDPKTLSPFAWFAALAGINNAQAIIDDKAAPDQLGVTAVDAHTLKIQLDKPLPWFVNLTANFAFFPVQKANVESSKEWTKPGNLIGNGAYVLKERVVNEKLVVVPNTHYWDNAKTVLQKVTFLPINQESAATKRYLAGDIDITESFPKNMYQKLLKDIPGQVYTPPQLGTYYYAFNTQKGPTADQRVRLALSMTIDRRLMTEKVLGTGEKPAWHFTPDVTAGFTPEPSPFEQMSQEELNAQAKTLLSAAGYGPQKPLKLTLLYNTSENHQKIAIAVASMWKKNLGVDVKLQNQEWKTYIDSRNTGNFDVIRASWVGDYNEPSTFLTLLTSTHSGNISRFNNPAYDKVLAQASTENTVKARNADYNAAEKILMEQAPIAPIYQYTNGRLIKPWLKGYPINNPEDVAYSRTMYIVKH

SEQ ID NO: 6309 - DNA, 267 bp, Escherichia coli
  misc_feature (25)..(25): n is a, c, g or t
atgcgagcagcgttttgggtagggngtgccgctttattgttgtcggcgtgtagtagtgaacctgttcagcaggcgactgcggcgcacgtagcgccaggtttaaaagcgtcgatgtccagtagtggagaagcaaattgtgcaatgatcggcggttcgctttctgttgcccgccaactggatggtacggcgattgggatgtgtgcattacccaacggcaaacgctgtagcgaacagtcacttgccgccgggagctgtggcagctattaa

SEQ ID NO: 6310 - protein, 88 aa, Escherichia coli
  misc_feature (9)..(9): Xaa can be any naturally occurring amino acid
MRAAFWVGXAALLLSACSSEPVQQATAAHVAPGLKASMSSSGEANCAMIGGSLSVARQLDGTAIGMCALPNGKRCSEQSLAAGSCGSY

SEQ ID NO: 6311 - DNA, 993 bp, Escherichia coli
  misc_feature (17)..(17): n is a, c, g or t
atgcagagcgataaagngctcaatttgccggcaggctactttggtattgtgttggggacgatagggatgggatttgcctggcgctatgccagccaggtttggcaggtcagccactggttgggggatgggctggtgattctggcgatgatcatctggggattattgactggcgcatttattacccgactcatacgctttccgcatagcgtgctggcagaagtgcgccatccagtgctgagcagttttgtgagtttgtttccggcaacgacgatgctggtggcgattggttttgttccgtggtttcgcccactggcggtgtgcctgttcagttttggtgtcgtggttcagttggcttatgccgcctggcaaactgcgggattatggcgcggatctcaccctgaagaagctaccacgcctggactgtatctgccgacagttgccaacaactttatcagcgcaatggcctgtggtgcgttgggctacaccgacgccggtctggtgtttttaggcgcaggcgttttctcatggctaagcctggaaccggtgatcttgcagcgtctgcgcagttcgggagaattacccacggcactgcggacatcactcggcattcagctcgctcctgcgctggtggcctgtagtgcctggctgagcgtcaacggcggcgagggtgacacgctggcgaaaatgcttttcggttatggactgctgcaactgctgtttatgctacgtctgatgccatggtatctctcccagccatttaatgcttcattctggagtttctcgttcggtgtatctgcactggcaaccaccggtttgcatctggggagtggcagcgataatggatttttccatacgctggcggtgccgctgtttatctttaccaattttattattgcaatactgctcatccgtacttttgcgcttctgatgcagggaaaattgttagtcagaaccgagcgcgccgttttaatgaaagcagaggacaaagaatga

SEQ ID NO: 6312 - protein, 330 aa, Escherichia coli
  misc_feature (6)..(6): Xaa can be any naturally occurring amino acid
MQSDKXLNLPAGYFGIVLGTIGMGFAWRYASQVWQVSHWLGDGLVILAMIIWGLLTGAFITRLIRFPHSVLAEVRHPVLSSFVSLFPATTMLVAIGFVPWFRPLAVCLFSFGVVVQLAYAAWQTAGLWRGSHPEEATTPGLYLPTVANNFISAMACGALGYTDAGLVFLGAGVFSWLSLEPVILQRLRSSGELPTALRTSLGIQLAPALVACSAWLSVNGGEGDTLAKMLFGYGLLQLLFMLRLMPWYLSQPFNASFWSFSFGVSALATTGLHLGSGSDNGFFHTLAVPLFIFTNFIIAILLIRTFALLMQGKLLVRTERAVLMKAEDKE

SEQ ID NO: 6313 - DNA, 669 bp, Escherichia coli
  misc_feature (230)..(230): n is a, c, g or t
atgcgtaccacatcatttgcgaaagttgcagctttatgcggcttgttggctctgtctggttgtgcctctaaaatcacccagccagataaatattctggttttttaaacaattactctgatttaaaagaaacaacctcggcaacaggtaaacctgttttacgttgggtagacccgagttttgatcaaagcaaatatgacagcatcgtctggaacccaatcacttattatcnggtaccgaaaccttctacccaggtagggcagaaagttctggataaaattttgaactataccaacaccgaaatgaaagaagcgatagcgcagcgtaaaccactggttaccaccgctgggccgcgtagtctgattttccgtggggccattaccggtgtagataccagtaaagaagggctgcaattctatgaagtggttcctgttgcattagtggttgcggggacgcaaatggctacaggccaccgtaccatggatactcgcttgtattttgaaggtgagctgattgatgcagcgactaataaaccggttatcaaggtcgttcgtcagggcgaaggtaaagacctgaataacgaaagtacgccaatggctttcgaaaatattaaacaagttattgatgacatggcgaccgatgccaccatgtttgacgttaacaaaaagtag

SEQ ID NO: 6314 - protein, 222 aa, Escherichia coli
  misc_feature (77)..(77): Xaa can be any naturally occurring amino acid
MRTTSFAKVAALCGLLALSGCASKITQPDKYSGFLNNYSDLKETTSATGKPVLRWVDPSFDQSKYDSIVWNPITYYXVPKPSTQVGQKVLDKILNYTNTEMKEAIAQRKPLVTTAGPRSLIFRGAITGVDTSKEGLQFYEVVPVALVVAGTQMATGHRTMDTRLYFEGELIDAATNKPVIKVVRQGEGKDLNNESTPMAFENIKQVIDDMATDATMFDVNKK

SEQ ID NO: 6315 - DNA, 2190 bp, Escherichia coli
  misc_feature (200)..(200): n is a, c, g or t
atgctttcgacacaatttaacagggataatcaacatcaagccatcatcaaaccgtcactccttgccggttgcatagcactggcactattaccttccgccgcttttgctgcaccagccactgaagaaacggtgattgttgagggttcagccacagccccagatgatggcgaaaatgattacaacgtaacgtctacctctgngggtacaaaaatgcagatgactcaacgtgatattcctcagtcggtcactattgttagccagcagcggatggaagatcagcagttacaaacgctgggcgaagtgatggaaaacacgctggggatcagcaaaagtcaggcggattccgatcgtgctctttattattcccgcggattccagatcgataactatatggttgatggtatccccacctattttgaatcgcgctggaatctgggcgacgcactttctgatatggcactgtttgaacgcgtagaagtagtgcgtggcgcgacaggcctcatgaccgggacgggtaatccatctgcggcaattaatatggttcgaaaacacgcgaccagtcgtgaatttaaaggcgatgtctcggcggaatacggtagctggaacaaagaacggtatgtggcggatttacaaagcccactcaccgaagacggtaaaatccgcgcacgaattgtcggcggctaccagaataacgactcatggctggaccgctacaacagtgaaaagaccttcttctccggcattgtcgatgctgatttaggcgatcttacgatgctttcagccggttacgaatatcagcgtattgatgttaatagcccaacctggggtggtttaccgcgctggaatactgatggcagcagcaacagttacgatcgcgcacgcagtaccgcacctgactgggcgtacaacgataaagagatcaacaaggtctttatgaccctgaagcagcggtttgctgatacctggcaagcgacgctgaatgccacccactctgaagtcgaatttgacagcaaaatgatgtatgtcgatgcctacgtaaacaaagcggatggtatgctggttgggccatacagcaattatggacctggctttgattatgtcggcggcaccggttggaacagcggcaaacgtaaagttgatgcgctggatctgttcgctgacggtagttatgaattgtttggtcgtcagcacaatttaatgtttggtggcagttacagcaaacaaaacaatcgttacttcagttcatgggccaacattttcccggatgaaattggcagtttctacaactttaatggcaatttcccacaaaccgactggtcaccacagagcctggcgcagaacgataccacacatatgaaatcgttatatgctgccactcgtgtcacccttgccgatccgctgcatctgatcctcggcgcacgttataccaactggcgagttgatacgctgacttacagcatggagaaaaaccacaccacgccttatgctggactggtgtttgacatcaatgacaactggtcgacctacgccagctatacctctattttccagccgcaaaatgatcgtgacagttcaggcaaatatctgactccaatcaccggtaacaactacgagctaggtctgaaatcggactggatgaatagccgtctgaccaccacgttagccatcttccgtattgagcaggataatgtcgctcagtccaccggtacacctatccccggcagcaacggcgaaaccgcctataaagcggtggatgggacagtcagtaaaggtgtggaatttgaactcaacggcgcaattaccgacaactggcagttgacgtttggcgcaacgcgctatattgccgaggataacgaaggaaacgccgttaatcctaatctgccacgcaccacgtttaaaatgttcaccagctatcggttgcctgtcatgccagagttgacggtcggcggtggtgttaactggcaaaatcgcgtgtataccgacaccgtgacgccgtatggcaccttccgcgccgagcaaggtagctacgcgctggtggatctcttcacccgctaccaggtgacgaaaaacttctcgttacaggggaatgtcaataacctgttcgacaaaacctacgataccaacgtggaaggttctatcgtctacggcgcaccgcgtaatttcagcattaccggcacgtatcaattctga

SEQ ID NO: 6316 - protein, 729 aa, Escherichia coli
  misc_feature (67)..(67): Xaa can be any naturally occurring amino acid
MLSTQFNRDNQHQAIIKPSLLAGCIALALLPSAAFAAPATEETVIVEGSATAPDDGENDYNVTSTSXGTKMQMTQRDIPQSVTIVSQQRMEDQQLQTLGEVMENTLGISKSQADSDRALYYSRGFQIDNYMVDGIPTYFESRWNLGDALSDMALFERVEVVRGATGLMTGTGNPSAAINMVRKHATSREFKGDVSAEYGSWNKERYVADLQSPLTEDGKIRARIVGGYQNNDSWLDRYNSEKTFFSGIVDADLGDLTMLSAGYEYQRIDVNSPTWGGLPRWNTDGSSNSYDRARSTAPDWAYNDKEINKVFMTLKQRFADTWQATLNATHSEVEFDSKMMYVDAYVNKADGMLVGPYSNYGPGFDYVGGTGWNSGKRKVDALDLFADGSYELFGRQHNLMFGGSYSKQNNRYFSSWANIFPDEIGSFYNFNGNFPQTDWSPQSLAQNDTTHMKSLYAATRVTLADPLHLILGARYTNWRVDTLTYSMEKNHTTPYAGLVFDINDNWSTYASYTSIFQPQNDRDSSGKYLTPITGNNYELGLKSDWMNSRLTTTLAIFRIEQDNVAQSTGTPIPGSNGETAYKAVDGTVSKGVEFELNGAITDNWQLTFGATRYIAEDNEGNAVNPNLPRTTFKMFTSYRLPVMPELTVGGGVNWQNRVYTDTVTPYGTFRAEQGSYALVDLFTRYQVTKNFSLQGNVNNLFDKTYDTNVEGSIVYGAPRNFSITGTYQF

SEQ ID NO: 6317 - DNA, 1053 bp, Citrobacter koseri
  misc_feature (59)..(59): n is a, c, g or t
atgtttttagcatcattgttgagacgtattgcatttagttactacgattataaagcttntaatttcaatattgaaaaaacagagtttgttgttatccatattcccgatcagattggcgatgctatggccatctttccagttattcgggcgcttgaattgcataaaattaaacatcttttaattgttacgtcgacaattaatttagaagtctttaacgcgctcaaacttgaacagactaaattaacattagtcacaatgactatgcaggatcacgcaacattaaaagaaataaaagatttagcgaagaacataacacagcaatacggtacgccggatctttgtatagaggcgatgcgtaaaaagaacctgaaaacgatgatatttatcagtcagttgaaagcaaaaacgaattttcaggttgttggtttaaccatgaagtgctattcccctttgtgtaagagcgcgtcccggatggatcagaatctccgggctcctgtacccatgacatgggcatttatgatgcgtgaggcgggttttccagcagtcaggccaatatatgaattgccactaagtaaggatgtactcgatgaggtacgcgaggaaatgcgatcgttaggatcttacattgcgcttaatttagaaggtagctcgcaggaacgtacattttcattatcgattgcagaaaatctaatagaaaaaattcaaagtgaaacagatataccaatagtgatcgttcatggaccaaaaggggaagaaaaagccagggtgttagtggattgttataataatgtctaccgtttatccttatcaccctcgattaaacgttcagcagcaatcataaaagatgcttatatcgcaataactcctgacacctcaatattacatatggcaagtgcctataatacccccgttgttgcaatttatgctgattacaaaacgcgatggccagcaatggccgatgtttcggagtcagtcgtcgttgggcaaaaaattgacaatataagtctggatgatttcgcaaaggcattaaaaagtgttttggcgagaatttga

SEQ ID NO: 6318 - protein, 350 aa, Citrobacter koseri
  misc_feature (20)..(20): Xaa can be any naturally occurring amino acid
MFLASLLRRIAFSYYDYKAXNFNIEKTEFVVIHIPDQIGDAMAIFPVIRALELHKIKHLLIVTSTINLEVFNALKLEQTKLTLVTMTMQDHATLKEIKDLAKNITQQYGTPDLCIEAMRKKNLKTMIFISQLKAKTNFQVVGLTMKCYSPLCKSASRMDQNLRAPVPMTWAFMMREAGFPAVRPIYELPLSKDVLDEVREEMRSLGSYIALNLEGSSQERTFSLSIAENLIEKIQSETDIPIVIVHGPKGEEKARVLVDCYNNVYRLSLSPSIKRSAAIIKDAYIAITPDTSILHMASAYNTPVVAIYADYKTRWPAMADVSESVVVGQKIDNISLDDFAKALKSVLARI

SEQ ID NO: 6319 - DNA, 1407 bp, Escherichia coli
  misc_feature (25)..(25): n is a, c, g or t
atgtcaaagcaacagatcggcgtcntcggtatggcagtgatggggcgcaaccttgcgctcaatatcgaaagccgtggttataccgtctctattttcaaccgttcccgtgaaaagaccgaagaagtgattgccgaaaatccaggcaaaaaactggttccttactatacggtgaaagagtttgttgaatctttggaaacgcctcgtcgcatcctgttaatggtgaaagcaggtgcaggcacggatgctgctattgattccctcaagccatacctcgataaaggtgacatcatcattgatggtggtaataccttcttccaggacaccattcgtcgtaaccgtgagctttctgccgaaggctttaacttcattggtaccggtgtctccggtggtgaagagggcgcgctgaaaggtccttctattatgcctggcgggcagaaagaggcttatgagctggttgcgcctatcctgagtaaaatcgctgccgtggcagaagacggcgagccatgcgttacttatattggtgccgacggcgcaggccattatgtgaagatggttcacaatggtattgaatacggagatatgcagctcattgctgaagcgtattctctgctcaaaggtggcctgaatctctctaatgaagaactggcccagactttcaccgagtggaataacggtgaacttagcagctacctgatcgacatcactaaagatatcttcaccaaaaaagatgaagacggtaactacctggttgatgtgattctggatgaagcagcaaacaaaggcaccggtaaatggaccagccagagcgcgctggatctcggcgaaccgctgtcgctgattaccgagtctgtgtttgcacgttatatctcttctctgaaagatcagcgcgttgccgcatctaaagttctctctggcccgcaagcgcagccagcaggcgacaaaggtgagttcatcgaaaaagttcgccgtgcgttgtatctgggcaaaatcgtttcttacgctcagggcttctctcagctgcgtgctgcgtctgaagaatacaactgggatctgaactacggcgaaatcgcgaagattttccgtgctggctgcatcatccgtgcgcagttcctgcagaaaatcaccgatgcttatgccgaaaatccgcagatcgctaacctgctgctggccccgtacttcaagcaaattgccgatgactaccagcaggcgctgcgcgatgtcgtcgcttatgcagtacagaacggtatcccggttccgaccttcgccgctgcggttgcctattatgacagctaccgtgccgctgttctgcctgcgaacctgatccaggcacagcgtgactatttcggggcgcatacttataagcgcattgataaagaaggtgtgttccatactgaatggctggattaa

SEQ ID NO: 6320 - protein, 468 aa, Escherichia coli
  misc_feature (9)..(9): Xaa can be any naturally occurring amino acid
MSKQQIGVXGMAVMGRNLALNIESRGYTVSIFNRSREKTEEVIAENPGKKLVPYYTVKEFVESLETPRRILLMVKAGAGTDAAIDSLKPYLDKGDIIIDGGNTFFQDTIRRNRELSAEGFNFIGTGVSGGEEGALKGPSIMPGGQKEAYELVAPILSKIAAVAEDGEPCVTYIGADGAGHYVKMVHNGIEYGDMQLIAEAYSLLKGGLNLSNEELAQTFTEWNNGELSSYLIDITKDIFTKKDEDGNYLVDVILDEAANKGTGKWTSQSALDLGEPLSLITESVFARYISSLKDQRVAASKVLSGPQAQPAGDKGEFIEKVRRALYLGKIVSYAQGFSQLRAASEEYNWDLNYGEIAKIFRAGCIIRAQFLQKITDAYAENPQIANLLLAPYFKQIADDYQQALRDVVAYAVQNGIPVPTFAAAVAYYDSYRAAVLPANLIQAQRDYFGAHTYKRIDKEGVFHTEWLD

SEQ ID NO: 6321 - DNA, 2430 bp, Escherichia coli
  misc_feature (1513)..(1513): n is a, c, g or t
gtgtcgtcgttgcccgttgctgccgtcttacctgagttacttgctgccctcgatggtgcatcgcaggtgttattaagtgcgccgaccggggccgggaaatcaacctggctgccgctgcaactgctggcgcatcccggcattaacgggaaaattatcctgctggagccgcgtcgtctggcggcgcgtaacgttgcgcaacgactggcggagctgcttaacgaaaagccaggcgataccgttggctaccggatgcgtgcgcaaaactgcgtcgggccgaatacccgcctggaagtggttaccgaaggcgtgctgacgcggatgatccagcgtgacccggaactgagcggtgttggattggtgatccttgatgaatttcatgagcgcagcttgcaggcggatttggcgttggcgctgttactcgatgtgcaacaaggtctgcgtgatgaccttaaactgctgattatgtcggctacgctggacaacgaccgcttgcagcaaatgctgccagaagcgcccgtcgtcatctcagaagggcgctcgtttccggttgaacgccgttatttgccgctgcccgctcatcagcgttttgacgaagccgtcgcggttgccaccgccgaaatgctgcgtcaggaaaatggatcattactgttatttttacctggcgtcggagaaattcagcgtgtgcaggaacaactggcttcgcgcatcggcagtgatgtgttgctctgcccgctgtatggcgcgttgtcgctgaacgatcagcgaaaagcgatcctcccggcaccgcaagggatgcgcaaagtggtgctggcgaccaatattgctgaaacaagtttaaccatcgaaggtattcgtctggtggtggattgtgcccaggaaaggggggcgcgttttgatccgcgtacagggcttacgcggttgattactcaacgcgttagtcaggcgtcgatgacgcaacgtgccgggcgtgccgggcgtctggaaccgggtatctgcctgcatttaatcgccaaagaacaagcagaacgcgctgccgcacaaagtgaaccggagatcttacaaagcgatctttccggtttgctgatgaaattactgcaatggggatgcagcgatccggcgcagatgagctggctggatcaaccgccaacggtgaatctactggccgcgaaacgcctgttacggatgctgggggcgctggacggtgaacggcttagtgcgcaagggcaaaaaatggcaacgctgggtaacgatccgcgtttagcggcaatgctggttagcgcgaagaacgacgacgaagctgctaccgcggcaaaaattgccgccattctcgaagagccgccacggatgggcaatagtgacctgggcgtggcgttttcgcgcaatcaacccgcctggcagcaacgtagtcagcaactgttaaaacgcttaaacgtacgcggcggtgaggcagacagttcgcttatcgcgccgctacttgccagagcgtatgccgatcgcattgctcgtcgccgtnggcaagatgaacgctatcaactggcgaacggcatgggggcgatgctcgatgccgacgatgcgctaagccgccacgaatggttgatcgcaccgttattattgcagggcagcgcctcaccggatgcacggattttactggcgctgccggtcgatattgatgagttagtacaacgctgcccgcagctggtacagcaatcggacaccgtggagtgggatgacgcgcaaggtacgctgaaagcctggcgtcggctgcaaattggtcagttgatggttaaagtgcaaccgctggcgaaaccctcggaagacgagttgcatcaggcgatgcttaacggcattcgtgataaaggtttaagcgtgctcaactggacggcggaagcggaacagctacgcttgcgtttgttatgcgccgcaaagtggttgccggaatatgactggccagcggttgatgatgaaagtttgttggcgacgctggaaacgtggctactgccgcatatgacaggcgtacattcgctacgcggcctgaaatcactcgatatttatcaggcactgcgtggattacttgattgggtaatgcagcaacgtctggatagtgaattgcctgcgcattacactgtgccgacgggaagccggatcgccattcgttaccatgaagataacccgcccgcgctggcggtgagaatgcaggagatgtttggtgaggccactaatccgactatcgcccaggggcgcgtaccgttggtgctggagttgctttcccctgcccaaaggccgctgcaaatcacgcgtgatttgagcgccttctggaaaggagcgtaccgtgaggtgcaaaaagagatgaaagggcgttatcccaaacatgtctggccggacgacccggcaaacaccgcaccgacgcgacgaacgaaaaagtattcgtga

SEQ ID NO: 6322 - protein, 809 aa, Escherichia coli
  misc_feature (505)..(505): Xaa can be any naturally occurring amino acid
MSSLPVAAVLPELLAALDGASQVLLSAPTGAGKSTWLPLQLLAHPGINGKIILLEPRRLAARNVAQRLAELLNEKPGDTVGYRMRAQNCVGPNTRLEVVTEGVLTRMIQRDPELSGVGLVILDEFHERSLQADLALALLLDVQQGLRDDLKLLIMSATLDNDRLQQMLPEAPVVISEGRSFPVERRYLPLPAHQRFDEAVAVATAEMLRQENGSLLLFLPGVGEIQRVQEQLASRIGSDVLLCPLYGALSLNDQRKAILPAPQGMRKVVLATNIAETSLTIEGIRLVVDCAQERGARFDPRTGLTRLITQRVSQASMTQRAGRAGRLEPGICLHLIAKEQAERAAAQSEPEILQSDLSGLLMKLLQWGCSDPAQMSWLDQPPTVNLLAAKRLLRMLGALDGERLSAQGQKMATLGNDPRLAAMLVSAKNDDEAATAAKIAAILEEPPRMGNSDLGVAFSRNQPAWQQRSQQLLKRLNVRGGEADSSLIAPLLARAYADRIARRRXQDERYQLANGMGAMLDADDALSRHEWLIAPLLLQGSASPDARILLALPVDIDELVQRCPQLVQQSDTVEWDDAQGTLKAWRRLQIGQLMVKVQPLAKPSEDELHQAMLNGIRDKGLSVLNWTAEAEQLRLRLLCAAKWLPEYDWPAVDDESLLATLETWLLPHMTGVHSLRGLKSLDIYQALRGLLDWVMQQRLDSELPAHYTVPTGSRIAIRYHEDNPPALAVRMQEMFGEATNPTIAQGRVPLVLELLSPAQRPLQITRDLSAFWKGAYREVQKEMKGRYPKHVWPDDPANTAPTRRTKKYS

SEQ ID NO: 6323 - DNA, 927 bp, Citrobacter koseri
  misc_feature (866)..(866): n is a, c, g or t
atgctcccgccttattttttgttcaaagagatgacagacacacactatattggtcgcttcgccccctctccttccggcgagcttcattttggctctctgattgccgcgcttggcagctatttacaggctcgcgcccggcaaggtcgctggctggtacgcattgaagatatcgacccgcctcgtgaagttcccggtgccgcagaaactatcctgcgccagctggaacattacggcctgtactgggacggcgacgttctctggcaatcgcaacgtcaccacgcctatcgcgaagcactcgcctggttacatgagcaaggactaagttattactgcacctgcacgcgtgcgcgtattcaaagcattggcggtatttacgacggtcattgccgggatttgcatcatggaccagacaacgccgcagtacgtatccgccagcagcatccggtcacccagtttactgacctgctgcgaggcattattcacgccgacgaaaaactggcacgggaagattttattattcatcgccgtgatggtttgtttgcctataacctggcggtggtggtggatgatcacttccagggcgtgagcgaaattgtccgcggggcagatttgatcgaaccgacggtgcggcaaatctcgctgtaccagctttttggctggaaagtgccagattacatccatttaccgctggcgcttaatccacaaggcgctaaactttccaagcagaatcatgcgcctgcgttgccgaaaggcgatccgcgcccggtgttaatcgcggcacttcattttctgggtcagcaggtagaaacacactggcaggatttcagcgtcgagcaaatccttcagtcagccgtcaaaaactggangctgaccgccgtgcctgagtcggcaattgtaaattcaacattctcaaatgcgtcatgctga

SEQ ID NO: 6324 - protein, 308 aa, Citrobacter koseri
  misc_feature (289)..(289): Xaa can be any naturally occurring amino acid
MLPPYFLFKEMTDTHYIGRFAPSPSGELHFGSLIAALGSYLQARARQGRWLVRIEDIDPPREVPGAAETILRQLEHYGLYWDGDVLWQSQRHHAYREALAWLHEQGLSYYCTCTRARIQSIGGIYDGHCRDLHHGPDNAAVRIRQQHPVTQFTDLLRGIIHADEKLAREDFIIHRRDGLFAYNLAVVVDDHFQGVSEIVRGADLIEPTVRQISLYQLFGWKVPDYIHLPLALNPQGAKLSKQNHAPALPKGDPRPVLIAALHFLGQQVETHWQDFSVEQILQSAVKNWXLTAVPESAIVNSTFSNASC

SEQ ID NO: 6325 - DNA, 1656 bp, Escherichia coli
  misc_feature (436)..(436): n is a, c, g or t
atggaattttcgttttcacccaaacttcttgttgttgctgtcgccgcagctcttcctctcatagccagcgcagcagataccccgtcaaccgccaccgcacgcaaaggctttgccggatacgatcacccaaaccagtatctggttaaaccggcgaccactattgccgacaacatgatgccggtgatgcagcatcctgcacaagacaaagaaacccagcagaaactggcggaacttgagaaaaaaaccggtaagaaaccgaacgtggttgttttcttgctggatgatgtgggctggatggacgttggctttaacggcggcggcgtggcggtgggtaaccctacaccagatatcgacgccgttgccagccaggggctgattttaacttcggcgtattctcaaccgagttcttccccaacccgcgccacgattctcaccngacaatactccatccaccacggcattctgatgccgccaatgtacgggcaaccgggcggtctgcaagggttaaccacgctgccgcagttgctgcacgatcagggctacatcacccaggctatcgggaaatggcatatgggggaaaacaaagagtcgcagccgcagaacgttggctttgatgatttccgcggctttaactcggtgtccgatatgtataccgaatggcgtgatgttcatgtcaacccggaagtcgccctgagcccggctcgttctgaatacatccaaaaactgccgttcagcaaagatgacgttcatgccgtgcgcggcggtgaacaggaagccattgccgacattacgccgaaatatatggaagacctggatcaacgctggatggaatatggcgttaagttcctcgacaagatggcgaagagtgataagcctttcttcctctattacggcactcgcggctgtcacttcgataactacccgaacgccaaatatgcgggtagctctccggcgcgcacctcttacggcgactgcatggtggagatgaacgatatcttcgccaatctgtataaagcactggagaaaaacggtcagcttgataacacgctgattgtgttcacctctgataacggtccggaagccgaagttccgccgcacggtcgcacgccgttccgcggtgcgaaaggttctacatgggaaggcggcgttcgtgtgccaaccttcgtttactggaaaggcatgatccaaccgcgtaaatctgacggcattgtcgatctggcggatctcttccctacggcactggatctggcggggcatcctggggcgaaagtagcgaatttagtaccgaaaaccacctttatcgatggtgtggaccagacatctttcttcctgggaacaaatggtcagtctaaccgtaaggccgagcactacttcctcaacggtaaactttctgctgtgcgtatggatgagttcaagtatcacgtcctgattcagcaaccttacgcttatacccagagcggatatcagggtggattcaccggcacagtaatgcaaacggcgggatcgtcggtgtttaacctgtacaccgatccgcaggaaagcgactctatcggcgtgcgccatatcccaatgggtgtaccgctacagaccgaaatgcatgcgtatatggagatcctgaaaaaatatccaccacgcgcgcagattaaatctgattaa

SEQ ID NO: 6326 - protein, 551 aa, Escherichia coli
  misc_feature (146)..(146): Xaa can be any naturally occurring amino acid
MEFSFSPKLLVVAVAAALPLIASAADTPSTATARKGFAGYDHPNQYLVKPATTIADNMMPVMQHPAQDKETQQKLAELEKKTGKKPNVVVFLLDDVGWMDVGFNGGGVAVGNPTPDIDAVASQGLILTSAYSQPSSSPTRATILTXQYSIHHGILMPPMYGQPGGLQGLTTLPQLLHDQGYITQAIGKWHMGENKESQPQNVGFDDFRGFNSVSDMYTEWRDVHVNPEVALSPARSEYIQKLPFSKDDVHAVRGGEQEAIADITPKYMEDLDQRWMEYGVKFLDKMAKSDKPFFLYYGTRGCHFDNYPNAKYAGSSPARTSYGDCMVEMNDIFANLYKALEKNGQLDNTLIVFTSDNGPEAEVPPHGRTPFRGAKGSTWEGGVRVPTFVYWKGMIQPRKSDGIVDLADLFPTALDLAGHPGAKVANLVPKTTFIDGVDQTSFFLGTNGQSNRKAEHYFLNGKLSAVRMDEFKYHVLIQQPYAYTQSGYQGGFTGTVMQTAGSSVFNLYTDPQESDSIGVRHIPMGVPLQTEMHAYMEILKKYPPRAQIKSD

SEQ ID NO: 6327 - DNA, 1236 bp, Escherichia coli
  misc_feature (1057)..(1057): n is a, c, g or t
atgcagcaacaggttccaacgcgtgcttttcatgtgatggcgaaaccgagcggttctgattgtaatctgaactgtgactactgtttttatctcgaaaaacaatccctttaccacgaaaagccagtcacgcatatggacgatgacacgctggaagcgtatgtccgtcactatatcgctgccagcgaaacccaaaacgaagtggcttttacctggcagggcggcgaaccaacgttactcgggctggatttttaccgccgtgccgtggcgctacaggcgaaatatggtgctggcaggaagataagtaatagcttccagactaacggcgtgctgctcgatgacgaatggtgtgcatttctggcagaaaatcattttcttgtagggttatcgctggatggtccggctgagatccacaatcaatatcgcgtgaccaaaggtggcagaccaacgcataagctggtgatgcgtgctctgacgctcctgcaaaaacatcatgtcgactataacgtgctggtctgcgtcaatcgcaccagtgcgttacaacctttgcaagtctatgattttctgtgtgatgcaggtgttgagttcatccagtttattccggtggtcgagcgcctggctgatgaaacggctgctcatgctggacttaagctacatgctcccggcgatattcagggcgaactgacggaatggtcggtgtgcccgcaagagttcggtgagtttctggtggcgattttcgaccactggattaagcgcgacgtcggcaagattttcgtaatgaatatcgaatgggcgttcgccaattttgtcggcgcaccgggcgcggtttgccatcatcagccaacctgtgggcgctcggtgattgttgagcacaacggtgacgtttatgcctgcgatcactatgtttatccgcagtatcgactagggaatatgcttcagcagacgattgcagaaatgattgattccccgcaacagcaggcatttggtgaagataaattcaagcagttaccggcacagtgtcgcagttgcaacgtgttaaaagcgtgctggggaggctgcncgaaacaccgctttatgctcgatgccagcggcaaacccgggctgaattatttgtgtgccgggtatcagcgttattttcgccatctaccgccatatcttaaagcaatggttgatttgctggcgcacggtcgtccggccagcgacattatgcaggcgcatttgctggtggtgagtaagtag

SEQ ID NO: 6328 - protein, 411 aa, Escherichia coli
  misc_feature (353)..(353): Xaa can be any naturally occurring amino acid
MQQQVPTRAFHVMAKPSGSDCNLNCDYCFYLEKQSLYHEKPVTHMDDDTLEAYVRHYIAASETQNEVAFTWQGGEPTLLGLDFYRRAVALQAKYGAGRKISNSFQTNGVLLDDEWCAFLAENHFLVGLSLDGPAEIHNQYRVTKGGRPTHKLVMRALTLLQKHHVDYNVLVCVNRTSALQPLQVYDFLCDAGVEFIQFIPVVERLADETAAHAGLKLHAPGDIQGELTEWSVCPQEFGEFLVAIFDHWIKRDVGKIFVMNIEWAFANFVGAPGAVCHHQPTCGRSVIVEHNGDVYACDHYVYPQYRLGNMLQQTIAEMIDSPQQQAFGEDKFKQLPAQCRSCNVLKACWGGCXKHRFMLDASGKPGLNYLCAGYQRYFRHLPPYLKAMVDLLAHGRPASDIMQAHLLVVSK

SEQ ID NO: 6329 - DNA, 975 bp, Escherichia coli
  misc_feature (547)..(547): n is a, c, g or t
atgacaggaaatttattgcggaaattgatatattcacaacgtcacattgcaatttctgcaacgtcaacattaagggctgcgccattggatttacgcgatctgaaaaccttcctgcatctggcggaaagccgccattttggccgcagcgcgcgggcaatgcacgttagcccgtccacgctctctcggcagattcagcgcctggaagacgatctcggtcagccgctgtttgtgcgcgataaccgcacggtaacgctaaccgaagcaggcgaagaactgcgcgttttcgcccagcaaacgctgttgcagtatcaacagctgcgccacaccatcgatcagcaaggaccgtcgctctctggcgaattacatatcttctgctcggtgaccgctgcctacagccatctgccgccgattctcgatcgcttccgcgcggaacacccgtcggtggagattaaactcacgactggtgatgcggcagatgcgatggaaaaggtcgtcactggcgaagcggatctggcgattgccgggaaaccggagactctgcccggcncagtggcattttcgatgctggagaatctggcagtagtgctgattgcccctgcgctaccctgcccggtgcgtaaccaagtttcggcagataagccggactggtctacagtgccgtttatcatggccgatcagggaccggtgcgccggcgcattgaactgtggtttcgacgcaacaaaatcagcaacccgatgatttacgctacggtcggcgggcatgaagcgatggtgtcgatggtagcgctcggctgtggcgtagccttgttgccggaagtggtgctggaaaacagcccggaaccggtgcgtaaccgcgtgatgattttagagcgcagtgatgaaaaaacgccgtttgaactgggcgtgtgtgtgcagaaaaagcggctacatgagccgctgattgaggcattctggaagattttgccgaaccattaa

SEQ ID NO: 6330 - protein, 324 aa, Escherichia coli
  misc_feature (183)..(183): Xaa can be any naturally occurring amino acid
MTGNLLRKLIYSQRHIAISATSTLRAAPLDLRDLKTFLHLAESRHFGRSARAMHVSPSTLSRQIQRLEDDLGQPLFVRDNRTVTLTEAGEELRVFAQQTLLQYQQLRHTIDQQGPSLSGELHIFCSVTAAYSHLPPILDRFRAEHPSVEIKLTTGDAADAMEKVVTGEADLAIAGKPETLPGXVAFSMLENLAVVLIAPALPCPVRNQVSADKPDWSTVPFIMADQGPVRRRIELWFRRNKISNPMIYATVGGHEAMVSMVALGCGVALLPEVVLENSPEPVRNRVMILERSDEKTPFELGVCVQKKRLHEPLIEAFWKILPNH

SEQ ID NO: 6331 - DNA, 1245 bp, Escherichia coli
  misc_feature (351)..(351): n is a, c, g or t
atgacacaggcaaacctgagcgaaaccctgttcaaaccccgctttaaacatcctgaaacctcgacgctagtccgccgctttagtcacggcgcacaactgcctgtgcagtcggcccttgatggtaaaaccatccctcactggtatcgcatgattaaccgtctgatgtggatctggcgcggcattgacccacgtgaaatcctcgatgtccaggcgcgtattgtgatgagcgatgccgaacgtaccgacgatgatttatacgatacggtgattggctaccgcggcggcaactggatttatgagtgggctacccaggcgatggtgtggcaacaaaaagcctgtgcggaagaaganccgcaactcagcggtcgacactggctgcatgcggctacgttgtacaacattgctgcctatcctcatctgaaaggagatgacctggccgagcaagcgcaggctttgtcaaaccgcgcctatgaagaggccgctcagcgtctgccgggcacgatgcggcagatggagtttaccgtacccggcggtgcgcccatcaccggctttttgcatatgccgaaaggcgatggcccgttcccgacagtattaatgtgtggtggtctggatgcgatgcagacggactattacagcctgtatgaacgttattttgcgccgcgcggcattgctatgctgactattgatatgccgtcggtgggcttttcttcaaaatggaagctcacccaggactccagcctgttgcatcagcacgttttaaaggcgctgcctaacgtaccgtgggtggatcacactcgcgtcgcggcctttggtttccgtttcggcgctaacgttgccgtgcgtctggcataccttgaatcgccgcgtctgaaagtggttgcctgtcttggtccggtagttcataccctgttgagtgattttaagtgccagcaacaggtgccggaaatgtatcttgacgttctggccagtcgtttagggatgcatgatgcttccgatgaagcgttgcgagtggagttgaatcgctattcattaaaagtgcaaggattgctgggacgtcgctgcccaacgccaatgttatcaggctactggaagaacgatccgttcagcccggaagaggactcacgcttaatcacgtcgtcatctgctgacggtaaattattagagatcccatttaacccggtgtatcggaattttgacaaaggccttcaggaaatcacagactggatcgaaaaacggttgtgttaa

SEQ ID NO: 6332 - protein, 414 aa, Escherichia coli
  misc_feature (117)..(117): Xaa can be any naturally occurring amino acid
MTQANLSETLFKPRFKHPETSTLVRRFSHGAQLPVQSALDGKTIPHWYRMINRLMWIWRGIDPREILDVQARIVMSDAERTDDDLYDTVIGYRGGNWIYEWATQAMVWQQKACAEEXPQLSGRHWLHAATLYNIAAYPHLKGDDLAEQAQALSNRAYEEAAQRLPGTMRQMEFTVPGGAPITGFLHMPKGDGPFPTVLMCGGLDAMQTDYYSLYERYFAPRGIAMLTIDMPSVGFSSKWKLTQDSSLLHQHVLKALPNVPWVDHTRVAAFGFRFGANVAVRLAYLESPRLKVVACLGPVVHTLLSDFKCQQQVPEMYLDVLASRLGMHDASDEALRVELNRYSLKVQGLLGRRCPTPMLSGYWKNDPFSPEEDSRLITSSSADGKLLEIPFNPVYRNFDKGLQEITDWIEKRLC

SEQ ID NO: 6333 - DNA, 531 bp, Escherichia coli
  misc_feature (44)..(44): n is a, c, g or t
atggatagttcgtttacgcccattgaacaaatgctaaaatttcncgccagccgccacgaagattttccttatcaggagatccttctgacccgtctttgcatgcatatgcaaagcaagctgctggaaaaccgcaataaaatgctgaaggctcaggggattaacgagacgttgtttatggcgttgattacgctggagtctcaggaaaaccacagtattcagccttctgaattgagttgtgctcttggatcatcccgtaccaacgcgacgcgtattgccgatgaactggaaaaacgcggttggatcgaacgtcgtgaaagcgataacgatcgccgctgtctgcatctgcaattaacggaaaaaggtcacgagtttttgcgcgaggttttaccgccgcagcataactgcctgcatcaactctggtccgcgctcagcacaacagaaaaagaccagctcgagcaaatcacccgcaaattgctctcccgtctcgaccagatggaacaggacggtgtggttctcgaagcgatgagctaa

SEQ ID NO: 6334 - protein, 176 aa, Escherichia coli
  misc_feature (15)..(15): Xaa can be any naturally occurring amino acid
MDSSFTPIEQMLKFXASRHEDFPYQEILLTRLCMHMQSKLLENRNKMLKAQGINETLFMALITLESQENHSIQPSELSCALGSSRTNATRIADELEKRGWIERRESDNDRRCLHLQLTEKGHEFLREVLPPQHNCLHQLWSALSTTEKDQLEQITRKLLSRLDQMEQDGVVLEAMS

SEQ ID NO: 6335 - DNA, 819 bp, Escherichia coli
  misc_feature (454)..(454): n is a, c, g or t
atggaaacctatgctgtttttggtaatccgatagcccacagcaaatcgccattcattcatcagcaatttgctcagcaactgaatattgaacatccctatgggcgtgtgttggcacccatcaatgatttcatcaacacactgaacactttctttagtgctggtggtaaaggtgcgaatgtgacggtgccttttaaagaagaggcttttgccagagcggatgagcttactgaacgggcagcgttggctggtgctgttaataccctcaagcggttagaagatggacgcttgcggggtgacaataccgatggtataggtttgttaagcgatctggaacgtctgtcttttatccgtcctggtttacgtcttctgctcatcggcgctggtggcgcatctcgcggcgtactactgccactcctttccctggactgtgcggtgacaatcactaatcggacgntatcccgcgcggaagagttggctaaattgtttgcgcacactggcagtattcacgcgttgggtatggacgaactggaaggtcatgagtttgatctcattattaatgcaacatccagtggcatcagtggtgatattccggcgatcccgccatcgctcattcatccaggcatttattgctatgacatgttctatcagaaaggaaaaactccttttctggcatggtgtgagcagcgaggctcaaagcgtactgctgatggtttaggaatgctggtggcacaagcggctcatgccttccttctttggcatggcgttctgcctgatgtagaaccggtcatcaaactattgcaacaggagttgtcagcgtga

SEQ ID NO: 6336 - protein, 272 aa, Escherichia coli
  misc_feature (152)..(152): Xaa can be any naturally occurring amino acid
METYAVFGNPIAHSKSPFIHQQFAQQLNIEHPYGRVLAPINDFINTLNTFFSAGGKGANVTVPFKEEAFARADELTERAALAGAVNTLKRLEDGRLRGDNTDGIGLLSDLERLSFIRPGLRLLLIGAGGASRGVLLPLLSLDCAVTITNRTXSRAEELAKLFAHTGSIHALGMDELEGHEFDLIINATSSGISGDIPAIPPSLIHPGIYCYDMFYQKGKTPFLAWCEQRGSKRTADGLGMLVAQAAHAFLLWHGVLPDVEPVIKLLQQELSA

SEQ ID NO: 6337 - DNA, 534 bp, Escherichia coli
  misc_feature (203)..(203): n is a, c, g or t
atgtctcgtgttgctaaagcaccggtcgttgttcctgccggcgttgacgtaaaaatcaacggtcaggttattacgatcaaaggtaaaaacggcgagctgactcgtactctcaacgatgctgttgaagttaaacatgcagataataccctgaccttcggtccgcgtgatggttacgcagacggttgggcacaggctggtaccgngcgtgccctgctgaactcaatggttatcggtgttaccgaaggcttcactaagaagctgcagctggttggtgtaggttaccgtgcagcggttaaaggcaatgtgattaacctgtctctgggtttctctcatcctgttgaccatcagctgcctgcgggtatcactgctgaatgtccgactcagactgaaatcgtgctgaaaggcgctgataagcaggtgatcggccaggttgcagcggatctgcgcgcctaccgtcgtcctgagccttacaaaggcaagggtgttcgttacgccgacgaagtcgtgcgtaccaaagaggctaagaagaagtaa

SEQ ID NO: 6338 - protein, 177 aa, Escherichia coli
  misc_feature (68)..(68): Xaa can be any naturally occurring amino acid
MSRVAKAPVVVPAGVDVKINGQVITIKGKNGELTRTLNDAVEVKHADNTLTFGPRDGYADGWAQAGTXRALLNSMVIGVTEGFTKKLQLVGVGYRAAVKGNVINLSLGFSHPVDHQLPAGITAECPTQTEIVLKGADKQVIGQVAADLRAYRRPEPYKGKGVRYADEVVRTKEAKKK

SEQ ID NO: 6339 - DNA, 804 bp, Escherichia coli
  misc_feature (556)..(556): n is a, c, g or t
atggctatccctgcatttggtttaggcactttccgtctgaaagacgacgttgttatttcatctgtgaaaacggcgcttgaacttgattatcgcgcaattgataccgcacaaatctatgataacgaagccgcagtaggtcaggcgattgcagaaagtggcgtgccacgtcatgaactctacatcaccactaaaatctggattgaaaatctcagcaaagacaaattgatcccgagtctgaaagagagcctgcaaaaattgcgtaccgattatgttgatctgacgctaatccactggccgtcaccaagcgatgaagtctctgctgaagagtttatgcaggcgctgctggaagccaaaaaacaagggctgacgcgtgagatcggtatttccaacttcacgatcccattgatggaaaaagcgattgctgctgttggcgctgaaaacatcgctactaaccagattgaactctctccttatctgcaaaaccgtaaagtggtcgcttgggctaaacagcacggtatccatattacttcctatatgactctggcgtatggcaatncactgaaagataaggttattgctcgtattgcagctaaacacaatgcgactccggctcaagtgattctggcgtgggctatgggggaaggttactcagtaattccttcttctactaaacgtgaaaacctggagagtaatcttaaggcacaaaatttacagcttgatgccgaagataaaaaagcgatcgccgcactggattgcaacgaccgcctggttagcccggaaggtctggctcctgaatgggattaa

SEQ ID NO: 6340 - protein, 267 aa, Escherichia coli
  misc_feature (186)..(186): Xaa can be any naturally occurring amino acid
MAIPAFGLGTFRLKDDVVISSVKTALELDYRAIDTAQIYDNEAAVGQAIAESGVPRHELYITTKIWIENLSKDKLIPSLKESLQKLRTDYVDLTLIHWPSPSDEVSAEEFMQALLEAKKQGLTREIGISNFTIPLMEKAIAAVGAENIATNQIELSPYLQNRKVVAWAKQHGIHITSYMTLAYGNXLKDKVIARIAAKHNATPAQVILAWAMGEGYSVIPSSTKRENLESNLKAQNLQLDAEDKKAIAALDCNDRLVSPEGLAPEWD

SEQ ID NO: 6341 - DNA, 1221 bp, Escherichia coli
  misc_feature (919)..(919): n is a, c, g or t
atgaaggttggcttctttttactgaaattcccgctgtcttcagaaaccttcgtccttaaccaaattaccgcgtttattgatatgggatttgaggtggagattctcgcgctgcaaaaaggcgacacccagaacacccacgcggcatggacgaaatacaaccttgccgccagaacccgctggttacaggacgaacctacgggcaaagtggcgaaactgcgtcaccgcgccagccagaccttacgcggcattcatcgtaaaaatacctggcatgcgctcaacctcaaacgctatggtgccgagtcgcggaacctgattttgtctgccatttgtggtcaggtcgcaacaccgtttcgcgccgatgtgttcatcgctcattttggccctgcgggggtaaccgcagcaaaactacgcgaactgggtgtcattcgcggcaaaattgccaccatcttccacggtattgatatctccagtcgggaagtgctcaaccactacactcccgaatatcagcaactgttccgccgtggcgacctgatgctaccgatcagcgatctgtgggccggaaggctgcaaaaaatgggctgcccgagggaaaaaattgccgtatcgcgcatgggcgtggacatgacgcgctttagcccgcgtccggtgaaagcgcctgcaacgccgctggaaatcatttccgtcgcacgcttaaccgagaaaaaaggcctgcatgtggcgattgaagcctgccgtcagttgaaagagcagggcgtggcatttcgctatcgcatcctcggcattggcccgtgggaacgacgcctgcgcaccctcatcgaacaatatcaactggaagatgtggtagagatgccgggctttaaaccgagccacgaagtgaaagcgatgctagacgacgcggatgttttcctgctgccttcgntaacgggtgcggacggcgatatggaaggcattccggtggcgctaatggaagcgatggcggtcggcattccggtggtttctactctgcatagcggaattcctgaactggtggaggccgataaatccggctggttggtgcctgagaacgatgctcgcgcactggcgcaacgactggcggcgtttagccaactggacaccgacgaactggctccggttgtcaaacgtgcgcgcgaaaaagtcgaacacgattttaaccagcaggtgatcaatcgagaactcgccagcttgctgcaggctttatag

SEQ ID NO: 6342 - protein, 406 aa, Escherichia coli
  misc_feature (307)..(307): Xaa can be any naturally occurring amino acid
MKVGFFLLKFPLSSETFVLNQITAFIDMGFEVEILALQKGDTQNTHAAWTKYNLAARTRWLQDEPTGKVAKLRHRASQTLRGIHRKNTWHALNLKRYGAESRNLILSAICGQVATPFRADVFIAHFGPAGVTAAKLRELGVIRGKIATIFHGIDISSREVLNHYTPEYQQLFRRGDLMLPISDLWAGRLQKMGCPREKIAVSRMGVDMTRFSPRPVKAPATPLEIISVARLTEKKGLHVAIEACRQLKEQGVAFRYRILGIGPWERRLRTLIEQYQLEDVVEMPGFKPSHEVKAMLDDADVFLLPSXTGADGDMEGIPVALMEAMAVGIPVVSTLHSGIPELVEADKSGWLVPENDARALAQRLAAFSQLDTDELAPVVKRAREKVEHDFNQQVINRELASLLQAL

SEQ ID NO: 6343 - DNA, 1395 bp, Shigella sonnei
  misc_feature (160)..(160): n is a, c, g or t
atgccatttaaaaaactctcccgacgcaccttcctgacggcaagctcggcgcttgccttcctccatacccctttcgcccgtgcaattcccgctcaacaaagcgttaacattaacgactacagccctcacgactggatcgcctcatttaaacaagccttcngcgaagggcaaacggtcgtcgtgcctgccggattggtttgtgacaatatcaacactggcatcttcattccttctggcaaaacgttacacatcctcggaagcctgcgcggcaacggcagagggcgatttgtcttacaggacggcagccaggtgacaggggaggagggcggcagtatgcataacatcaccctggatgtgcgcggctctgactgcaccatcaaagggctggcgatgagcggctttggtccggtaacgcagatttatatcggcggcaaaaacaaacgggtcatgcacaacctgaccatcgataacctgaccgttagccacgctaattacgccatcttacgccagggatttcataaccagataatcggtgccaacatcaccaactgtaagttcagcgacttacagggcgacgctattgaatggaacgtggcgattaacgacagtgatattttgatatccgaccatctcattgagcgcattaactgtaccaacggcaaaatcaactggggcatcggcataggccttgcgggaagtacctacgataataattatccggaaaaccaggcagtgaaaaactttgtcgtggcgaatatcacgggatcggattgtcggcaactgatccatgttgaaaatggtaaacattttgttatccgtaatatcaaagctcgtaatatcacgccggatttcagtaagaaagcaggtattgataacgccacagttgctatttatggttgtgacaactttgtgattgataatattgaaatgattaatagtgccgggatgttaatcggctatggggtaattaaaggcaaatatctctcgataccgcagaatttccgagtgaatgatattcaactggataatactcatcttgcttataaattgcgcggcatccaaatctccgccgggaatgctgtctcctttgtggcgctgactaacattgagatgaagcgtgcgtcgctggagttacacaacaaaccgcaacatctttttatgcgcaatatcaatgtgatgcaggaatcctcagttggacccgcattgagcatgaactttgacatgcgcaaagacgttcgaggcgtttttatggcaaagcgtaaaacgctgctttcactcacgaatattcatgcagtgaatgaaaaagggcaaagctccgtcgatatcgacaggattaatcaccatattgttaatgtggaaaagattaactttagattgccggaacggagggagtag

SEQ ID NO: 6344 - protein, 464 aa, Shigella sonnei
  misc_feature (54)..(54): Xaa can be any naturally occurring amino acid
MPFKKLSRRTFLTASSALAFLHTPFARAIPAQQSVNINDYSPHDWIASFKQAFXEGQTVVVPAGLVCDNINTGIFIPSGKTLHILGSLRGNGRGRFVLQDGSQVTGEEGGSMHNITLDVRGSDCTIKGLAMSGFGPVTQIYIGGKNKRVMHNLTIDNLTVSHANYAILRQGFHNQIIGANITNCKFSDLQGDAIEWNVAINDSDILISDHLIERINCTNGKINWGIGIGLAGSTYDNNYPENQAVKNFVVANITGSDCRQLIHVENGKHFVIRNIKARNITPDFSKKAGIDNATVAIYGCDNFVIDNIEMINSAGMLIGYGVIKGKYLSIPQNFRVNDIQLDNTHLAYKLRGIQISAGNAVSFVALTNIEMKRASLELHNKPQHLFMRNINVMQESSVGPALSMNFDMRKDVRGVFMAKRKTLLSLTNIHAVNEKGQSSVDIDRINHHIVNVEKINFRLPERRE

SEQ ID NO: 6345 - DNA, 369 bp, Klebsiella pneumoniae
  misc_feature (23)..(23): n is a, c, g or t
gtgtcagacacactttccggganaacgcatcccgatgacaatgacgaccatccctggtggggactaccctgcacagtgacgccctgtttcggcgcccgtctggtgcaggagggtaaccggttgcattaccttgccgaccgtgccggtatcagaggccggttcagagatgcggatgcgtaccctctggaccaggcctttccgctgctgatgaaacaactgaaattaatgctcaccagtggtgaactgaatccccgccatcagcataccgtgacactgtatgcgaaggggctgacctgtgaagccgacaccctcggctcctgtggttacgtttatctggctgtttatccgacacctgaaacgaaaaagtaa

SEQ ID NO: 6346 - protein, 122 aa, Klebsiella pneumoniae
  misc_feature (8)..(8): Xaa can be any naturally occurring amino acid
MSDTLSGXTHPDDNDDHPWWGLPCTVTPCFGARLVQEGNRLHYLADRAGIRGRFRDADAYPLDQAFPLLMKQLKLMLTSGELNPRHQHTVTLYAKGLTCEADTLGSCGYVYLAVYPTPETKK

SEQ ID NO: 6347 - DNA, 693 bp, Escherichia coli
  misc_feature (603)..(603): n is a, c, g or t
atggacttattgccttttttactggacgcgaacctcagcgcgacaaacccacccgctattccgcactggtggaagtgtcaaccgcttattcccacccttctgtcacaggaactgaaaaactatctgaagcttaatgttaaagagaaaaatgttcagattgcagaccaggtgattattgatgaaagtgccggtgaggttgttatcggcgcgaatacccgtatttgccacggtgccgttattcagggtccggtagtgattggcgcaaactgcctaataggtaattatgcgtttattcgtcctggcacaataatcagcaatggcgtaagaattggttttgccaccgaaattaaaaatgcggttattgaagcggaagccacgattggtccgcaatgctttattgccgactcggtagttgcaaaccaggcatatttgggcgcacaagtacgaaccagtaatcatcgtctggatgaacagcccgtgtctgttcgaactccagatggaattatcgctaccggatgcgataaattaggttgttatatcgggcagcgttcacgccttggcgtacaagttattattttgcctgggcgaattatttccccgaanacgcaacttggcccgcgcgtgattgtagaacgtaatttacctaccggaacttattcactccgacaagaacttatccgtacaggagattaa

SEQ ID NO: 6348 - protein, 230 aa, Escherichia coli
  misc_feature (201)..(201): Xaa can be any naturally occurring amino acid
MDLLPFLLDANLSATNPPAIPHWWKCQPLIPTLLSQELKNYLKLNVKEKNVQIADQVIIDESAGEVVIGANTRICHGAVIQGPVVIGANCLIGNYAFIRPGTIISNGVRIGFATEIKNAVIEAEATIGPQCFIADSVVANQAYLGAQVRTSNHRLDEQPVSVRTPDGIIATGCDKLGCYIGQRSRLGVQVIILPGRIISPXTQLGPRVIVERNLPTGTYSLRQELIRTGD

SEQ ID NO: 6349 - DNA, 1410 bp, Klebsiella aerogenes
  misc_feature (236)..(236): n is a, c, g or t
atggccacccatttggtctggtttcgcatggatttacgccttaacgataatctggcgctggccgccgcctgccgcgacccgcaggcgcaggtgctggcgctgtatatcgctacgccagaacagtggcgccaacatcacatggcgccgcgccaggcggcctttatcgccagccatttacgcagcctccacgcggcgttggcggaacgcggtattccgctgctggtagaagaagcggncgatttcgccgccagcatcgagttgctaaagcgcttttgtaaacagcaccaggtgagccatctattttataactatcagtatgagtttaatgagcgccggcgcgacgccggtgttgagaaaagcctgacagaagtcacctgccaggggtttgacgacagcgtgctgttgccgccgggcagcgtgatgaccggcaaccgcgagatgtataaagtctttacgccgtttaaaaatgcctttatccgccgcctgcgtgaagggctgccggagtgcgtggcggcgccgaaaccgcgccagtcagccacccgacaggcctcgccgctgcctgagatcaactatccgcaaacggcatttgacaccgatctgttcgcggcggatgaaaaaacggcgctggctcgattgcgcgcgttttgtcagcagccggcggcggattacgaccagcagcgcgattttccggcgatagagggaaccagccggctatcgccgtgtctcgcggtaggcgtactgtcgccgcgccagtgcctgcatcgcttgttacgggagcagcccggcgcgctggatggcgaagcgggcgcaagctggctgaacgagattatctggcgcgagttctatcgtcatctgatggtttactacccgaaactgtgtaaaggccggccgtttgtcgcctggaccgacaaggtcgcctggcgcagcaatgaggatgaactgcgggcctggcaacaggggcaaaccggtttccccatcgtcgatgccgccatgcggcagcttaacgccaccggctggatgcacaatcgcctgcggatgattgtcgccagcttcctggcgaaagacctgcgcctcgactggcggcacggagagcgctatttcatgagccaactgatcgacggcgatttggcggccaacaacggcggctggcagtgggcggcctcgaccggtaccgatgcagccccttattttcgtattttcaatccgacgacccagggcgagaaatttgataagcagggcgagtttattcgccgctggctgccggaactggctgaagtgccagagaaagcgctgcatcagccgtggctgtgggcggataaacagggggtaacgctgaggtatccgcgcccgctggttgaccataagcaggcgcggctggagacgctggcggcctgggaagccgccagatag

SEQ ID NO: 6350 - protein, 469 aa, Klebsiella aerogenes
  misc_feature (79)..(79): Xaa can be any naturally occurring amino acid
MATHLVWFRMDLRLNDNLALAAACRDPQAQVLALYIATPEQWRQHHMAPRQAAFIASHLRSLHAALAERGIPLLVEEAXDFAASIELLKRFCKQHQVSHLFYNYQYEFNERRRDAGVEKSLTEVTCQGFDDSVLLPPGSVMTGNREMYKVFTPFKNAFIRRLREGLPECVAAPKPRQSATRQASPLPEINYPQTAFDTDLFAADEKTALARLRAFCQQPAADYDQQRDFPAIEGTSRLSPCLAVGVLSPRQCLHRLLREQPGALDGEAGASWLNEIIWREFYRHLMVYYPKLCKGRPFVAWTDKVAWRSNEDELRAWQQGQTGFPIVDAAMRQLNATGWMHNRLRMIVASFLAKDLRLDWRHGERYFMSQLIDGDLAANNGGWQWAASTGTDAAPYFRIFNPTTQGEKFDKQGEFIRRWLPELAEVPEKALHQPWLWADKQGVTLRYPRPLVDHKQARLETLAAWEAAR

SEQ ID NO: 6351 - DNA, 1200 bp, Enterobacter cloacae
  misc_feature (325)..(325): n is a, c, g or t
atgtcgcaataccataccttcacggccagcgatgcggtggcttacgcacaacaatttggcgggctcgacgatccgtctgagctggtgtcggcgcaggaggtaggcgacggcaatctcaatctggtgttcaaaattttcgatgctcagggcgtgagccggattattgttaagcaggcgctgccctacgtgcgctgcgtcggcgaatcctggccactgaccctcgaccgcgcgcgcctcgaagcacagaccctggtcgcccactatcagcacagcccgcagcatacggtacacattcttcatttcgatcccgctctggcggtgatgntaatggaggacctttccgatcaccgtatctggcgcggcgagcttatcggcaacgtctactatccgcaggcggcaggccagttgggcgaatatctggcgcagacgctgttccacaccagcgatttctatctccatccgcatgagaaaaaagcgcaggtggcgcaatttatcaatccggaaatgtgcgagatcaccgaggatctgttttttaacgatccgtatcagatccacgagcgcaataactatccggcggagctggaagaagaggttgccgccctgcgtgaggacgctcagcttaaactggcggtcgcggcgctgaagcaccgctttttctcacaggccgaagccctgctgcacggcgatattcatagcggctccatcttcgtcgctgaaaatagccttaaagccatcgatgccgaatttggctatttcggccctatcggttttgacgtcggcaccgccattggcaatttgttgcttaactattgcggtctacctggccatctcggcattcgcgatgccgccgccgcgcgcgaacagcggctcaacgatatacagaccttgtggcacactttcagcgagcgtttccaggcgttagcaacggagaaaacacgcgatgcggcgctggcctgccccggttacgcctcagtattcctcaaaaaagtatggtgcgatgccattggattctgcggaactgaactgatacgccgcagcgtcgggctttcacacgtcgccgatatcgattcgattccggacacggccatgcgccacgaatgcctgcgccatgcaattacgctcggcaaagcgctgatcgtcatcgccgagcgtatcgatagcgtggacgaacttatcgcccgcgtacgtcagtacagctaa

SEQ ID NO: 6352 - protein, 399 aa, Enterobacter cloacae
  misc_feature (109)..(109): Xaa can be any naturally occurring amino acid
MSQYHTFTASDAVAYAQQFGGLDDPSELVSAQEVGDGNLNLVFKIFDAQGVSRIIVKQALPYVRCVGESWPLTLDRARLEAQTLVAHYQHSPQHTVHILHFDPALAVMXMEDLSDHRIWRGELIGNVYYPQAAGQLGEYLAQTLFHTSDFYLHPHEKKAQVAQFINPEMCEITEDLFFNDPYQIHERNNYPAELEEEVAALREDAQLKLAVAALKHRFFSQAEALLHGDIHSGSIFVAENSLKAIDAEFGYFGPIGFDVGTAIGNLLLNYCGLPGHLGIRDAAAAREQRLNDIQTLWHTFSERFQALATEKTRDAALACPGYASVFLKKVWCDAIGFCGTELIRRSVGLSHVADIDSIPDTAMRHECLRHAITLGKALIVIAERIDSVDELIARVRQYS

SEQ ID NO: 6353 - DNA, 621 bp, Klebsiella aerogenes
  misc_feature (361)..(361): n is a, c, g or t
atgtacaagaaaacctgtctcgcgcttgccgttctggcgcttggcggctgccgcatcgtctcgcagcaggagctggcagacctgaaatccccgcccaatccgcatatggcgaacatcgataaaacctggcagcagagcatcgtgccgcaggtggtcgccaacgcccgcccggcggcggagttgatgagcgcgctgaaggcgcaaaaagatatcgatagcgcctgcaaagcgctgggctaccgcgcccaggacgaaaacccgtgcatcttttacgttaaggtgacaggcgccgtcagcaagctggatagcgcctcgcgtagcggcaaaatgaccctcgccgatggcagcatcggtaatgtgntggtgcagattggccctaccctgcgcggcaccctgctgcgtgacggttatcgcgacgccagctaccaggactttaacgaccaggtgctgtttggcgaatacagcaaaaatattaatagtcaggcggtcaaaatgattcaggcggccaacctgaaaaccggcgacaacgtagaagtgtatggcgtcttttcggcctgggatattccacaaactattccggaaatcaccccggcgaaaatcgttcatccgggaggtcaataa

SEQ ID NO: 6354 - protein, 206 aa, Klebsiella aerogenes
  misc_feature (121)..(121): Xaa can be any naturally occurring amino acid
MYKKTCLALAVLALGGCRIVSQQELADLKSPPNPHMANIDKTWQQSIVPQVVANARPAAELMSALKAQKDIDSACKALGYRAQDENPCIFYVKVTGAVSKLDSASRSGKMTLADGSIGNVXVQIGPTLRGTLLRDGYRDASYQDFNDQVLFGEYSKNINSQAVKMIQAANLKTGDNVEVYGVFSAWDIPQTIPEITPAKIVHPGGQ

SEQ ID NO: 6355 - DNA, 1545 bp, Citrobacter amalonaticus
  misc_feature (976)..(976): n is a, c, g or t
atgacgccgcaagatatcgtcgctccccaaccagtcgaatctgaagtgattatcgaaacccgtggcctttcgcgcatttatcccggcgtgaccgcgctggataacgtgaattaccgggtctatcgaaataaggttaacgttctgatcggagaaaatggtgcgggtaaatccaccatgatgaaaatgcttgccggcgttgaaacgccctcctccggtcaaattattctcgatggcgaggcggtgactttaaactctacccatcaggcagagaaattcggcatcagcattattttccaggaactgaatttattccccaatatgaatgtgatggacaacatattcatggctaatgaattctttcagaaaggacgcatcaacgaaaaatatcaatatgcgttagccaaatcgctactggagcggctggagctcgacgtcgatccctacacgcagctgggcgaactggggattggccatcagcagttggttgaaatcgcccgtgcgctatcaaaagacacccgcgtgctgattatggatgaacccacctcggcgctgagccagtccgaggtcaaagtgctgtttaaggtcatcgagcagcttaagcgccgcggcgtcaccattatctatatttcgcatcgcctcgaagagctgatggagattggcgacaacatcaccattttccgcgatggtcgctttatcagcgagcgcaacgtcagcgacgccagcgtgccgtggatcatcgagcagatggtcggcgataagagaaagcactttgattatcagcccgcgccaaaaggcaacgcggtgcttgacgtcaaggggctgaccgcgctgcatccgagcggcggctacaaactcaatgatgtcacctttaccctcagcaaaggcgaagtgatcggcatttacggcctgctgggcgccgggcgcaccgagctgtttaaagggctggttggcttgatgccctgccagaacggcgagntacatcttaacggcgaaagcatcggcaaatctcgctttcaacaccgtctgaaaaaggggctggcgctggtgccggaagaccgtcagggcgaaggcgtggtgcagatgatgtcgattcaatccaacatgacgctctctgattttagcctgcagggttttcgccgcgcctggcgctggctgaatccgcagaaagaagagtcctgcgtaaaagagatgattcagcaattggctatcaaggtgagcgacgccaatttgcccatcacctcgctgagcggcggcaatcaacaaaaagtggtgctgggtaaggcgctgatgacccagccgcaggtggtgttcctcgacgaaccgacgcgcggtatcgacgtcggcgcaaaaaccgatgtctatcacctgatcggcaaaatggcccagcaggggctggcggttatgttctcctcttcggagctggatgaagtgatggcgctggccgaccgcatcctggtgatggccgatggccgcattaccgccgatttaccgcgccatgcggtgacccgcgaaaagttaatcgcggcttcaacacctcaagattaa

SEQ ID NO: 6356 - protein, 514 aa, Citrobacter amalonaticus
  misc_feature (326)..(326): Xaa can be any naturally occurring amino acid
MTPQDIVAPQPVESEVIIETRGLSRIYPGVTALDNVNYRVYRNKVNVLIGENGAGKSTMMKMLAGVETPSSGQIILDGEAVTLNSTHQAEKFGISIIFQELNLFPNMNVMDNIFMANEFFQKGRINEKYQYALAKSLLERLELDVDPYTQLGELGIGHQQLVEIARALSKDTRVLIMDEPTSALSQSEVKVLFKVIEQLKRRGVTIIYISHRLEELMEIGDNITIFRDGRFISERNVSDASVPWIIEQMVGDKRKHFDYQPAPKGNAVLDVKGLTALHPSGGYKLNDVTFTLSKGEVIGIYGLLGAGRTELFKGLVGLMPCQNGEXHLNGESIGKSRFQHRLKKGLALVPEDRQGEGVVQMMSIQSNMTLSDFSLQGFRRAWRWLNPQKEESCVKEMIQQLAIKVSDANLPITSLSGGNQQKVVLGKALMTQPQVVFLDEPTRGIDVGAKTDVYHLIGKMAQQGLAVMFSSSELDEVMALADRILVMADGRITADLPRHAVTREKLIAASTPQD

SEQ ID NO: 6357 - DNA, 1038 bp, Enterobacter cloacae
  misc_feature (662)..(662): n is a, c, g or t
atgaacgtcacccgcaagcagcagcggattcttcaacgcgctattgagcaatggcagcaggagggggttctgaacagcagtgatggccaacggctgtcagcgtcgctatctgtccgtactttcgactggcagcgcctgagccgctatgccttctggaccgcgatagcctgcgtcttgattgcgctggggagtctgttcgccgacgctgaattgattgcggcgattatcaatctgttcagcgattccgctgtcgcgcggattattctgccgacgctgctggccatcgcattttactattgggggttccgccgccagcggcgcgaatcccagtggcactacagcaccgaggcgattttgttcctcggcgtcgtctgtaccgccattgccttgtggcagctaggcgatcggctggacgacggcagcggccatgtggcgccgctaatactgctcggctgcgccatttacggcctgatagggtttttcgcccgctccgggctggtgtggctgttcttcctgctggcgttaggtaactggtttggcgcggaaaccggctatgtatcaggttggggcgcctactggctggggatgagcttcccgattcgtttcgtgctgttcggcggcgtgctgctggcgctgtgctacttgatgcaaaatgtattacnccagcggcagttgtttaccgttagtaaggcgatggggctgacctggctgtttgtcgcgctgtggatcctgtcgattttcggcaactacgattccgatagctggtatggggtgagccaggcgcaactgctgccgtgggggctgctgtttgcgctggcggcggcgatctgtatttatatcagcctgaaaaccgacgatggcatgctgcgtggatttggcctgacgtttcttgccatcaacctctacacccgcttcttcgaattcttctggtatagcctgcacaaggtggtgttcttccttatcctggcggtatcgctggcgatgattggtcgctacgccgagcggatctggcacgccggcgagggggagaaaaagtaa

SEQ ID NO: 6358 - protein, 345 aa, Enterobacter cloacae
  misc_feature (221)..(221): Xaa can be any naturally occurring amino acid
MNVTRKQQRILQRAIEQWQQEGVLNSSDGQRLSASLSVRTFDWQRLSRYAFWTAIACVLIALGSLFADAELIAAIINLFSDSAVARIILPTLLAIAFYYWGFRRQRRESQWHYSTEAILFLGVVCTAIALWQLGDRLDDGSGHVAPLILLGCAIYGLIGFFARSGLVWLFFLLALGNWFGAETGYVSGWGAYWLGMSFPIRFVLFGGVLLALCYLMQNVLXQRQLFTVSKAMGLTWLFVALWILSIFGNYDSDSWYGVSQAQLLPWGLLFALAAAICIYISLKTDDGMLRGFGLTFLAINLYTRFFEFFWYSLHKVVFFLILAVSLAMIGRYAERIWHAGEGEKK

SEQ ID NO: 6359 - DNA, 1428 bp, Enterobacter cloacae
  misc_feature (1031)..(1031): n is a, c, g or t
atgaattcgtctgctgtttcacccggccgcgccggattactgctgttactgaccggccagatgctgccgttaattgatacctcgataaccaacgtggcgctggactcgatcacccactccctcgacgccagcgccacccaactggagcttatcgtcgcgctgtacggcgtggcctttgccgtctgcctggcgatgggcagcaaactgggcgataactatggacgccgccgcctgtttctgtggggggtggcggtattcggcatcgcctcgctgctatgcggaatggctaactccattaacgccctactcgccgcacgaacgctgcaaggtgccggcgcggcgctgatcgtgccgcaaatcctcgccaccctgcacgtcaccctgaaaggcaccgctcacgcccgggcgatcagcctgtacggcggtatcggcggcatcgcgtttatcgtcggccagatgggcggcggctggctggtctccgccgatatcgccgggctcggctggcgtaacgccttctttatcaacgtgcctatctgcctgctggtgttggcctttagccgccgctatgtgccggaaacccgccgcgaaatccattccagtatcgactgggagggaactttcagcctggcgttaatcctctgctgcctgctgttccctatggcgctggggccggagctacactggccatgggagctacagctgcttttgctggccgtactccccctgctcggctggatgcgcctgagcgcgctgcgtaagcagcagcgcggcgagcaatcgctgttaccgccacggctgttgaaactcaccagcatccgttttggtatggctatcgcactgctgtttttcagcgcctggtccggctttatgttttgtatggcgctgaccatgcaggccgggctggggatggcgccgtggcagtccggcaacagttttatcgctctcggggtggcctattttatctccgcgctgtacgcgccaaagcttatcgctcgctacagcatgggacggattttgctgattggcctggnggtgcagattagcggcctgctgctgctgagcgtcaccttttatcaacttggcctgcggaccacgacgctggcgctggtgccctccaccgcgctgatcggctatggtcaggcgttaatcgtcaacagtttctatcgtatcgggatgcgggacattcgcgcttgcgatgccggagccggtagcgccatcctcagcaccttgcagcaggcgacgctggggctggggccggccattctcggctcactgttcttaaccctggccaagcgcggcggcggtgactatacgcaggcgctgatcgtcttcctgctggtcgaggtggcgatgatgctgctgctgggcgctattgccctttggctgcgccatcacctgaacctgcagccggcggcgacggcgtcctga

SEQ ID NO: 6360 - protein, 475 aa, Enterobacter cloacae
  misc_feature (344)..(344): Xaa can be any naturally occurring amino acid
MNSSAVSPGRAGLLLLLTGQMLPLIDTSITNVALDSITHSLDASATQLELIVALYGVAFAVCLAMGSKLGDNYGRRRLFLWGVAVFGIASLLCGMANSINALLAARTLQGAGAALIVPQILATLHVTLKGTAHARAISLYGGIGGIAFIVGQMGGGWLVSADIAGLGWRNAFFINVPICLLVLAFSRRYVPETRREIHSSIDWEGTFSLALILCCLLFPMALGPELHWPWELQLLLLAVLPLLGWMRLSALRKQQRGEQSLLPPRLLKLTSIRFGMAIALLFFSAWSGFMFCMALTMQAGLGMAPWQSGNSFIALGVAYFISALYAPKLIARYSMGRILLIGLXVQISGLLLLSVTFYQLGLRTTTLALVPSTALIGYGQALIVNSFYRIGMRDIRACDAGAGSAILSTLQQATLGLGPAILGSLFLTLAKRGGGDYTQALIVFLLVEVAMMLLLGAIALWLRHHLNLQPAATAS

SEQ ID NO: 6361 - DNA, 1083 bp, Enterobacter cloacae
  misc_feature (526)..(526): n is a, c, g or t
atgaaatacactcttccggcgttggcgctggccatcagcgcgacgttaggcggctgcgcgactcaccattccgctgccgtcgcgcaaccggttgttaactctcctgcggctaacgtggcgcaaccgctgcagcgccagctagcggaagggttgtacgagatggcgctaagcccgcagggtgatgcgctgtacgtcgccagcgccgaaggctttaaagatgtgcagggcggggcggtttacaagctggatccgcaaacccttaataccatcggcctgacgcataccgatctgaaaaacttcgctttgcagctctctgcggatggtaaaacgctatacgtcagcaattcgcttgacggcggcatcagcgctatcgacaccgccaccggcaaggtaaaaaaccgcctgctgttcagcgagcgcaatgaaaaagggttcccctatggggcgcgtcagctgctgctgttaaataataccctctacgttggcgcggtcgccgacccggcgcaaatctgggtggttgacgccnctaccatgaagctgaaaacgcggattaaaaacaccggtaaatggatgaccggcctgcactattccgcacaaaccgggcgcgtatacgccgccaacggcagcggtgaaattctggtgattaacccgcgtaaccaacgcattgaacagcgctggaagccgctgggcgacaagccggcgctgctgcttaatatggccgaagatagcgacaccggtcgtctgttcgtgaccgataactcgaaagcgaaaaccaccctggtgctggatatccacagtggcaaactgcttaaacagctcgaggtcggcgattcgctggcggtgcagttcaatgggaaacgccacgaaatttatatttcacagcgtgaatccggcaaggttatcagccttgacgacagccgctacacgctgaagaaaagctgggcgctgccggccaatcccaacagcctgctgctttccgccgatggtcagacgctgtttgtcaccgtcaaacagcccttcaataaagaccactccactaaaggcccggacagcgtcgtacgcatcgacctgaacgagcaataa

SEQ ID NO: 6362 - protein, 360 aa, Enterobacter cloacae
  misc_feature (176)..(176): Xaa can be any naturally occurring amino acid
MKYTLPALALAISATLGGCATHHSAAVAQPVVNSPAANVAQPLQRQLAEGLYEMALSPQGDALYVASAEGFKDVQGGAVYKLDPQTLNTIGLTHTDLKNFALQLSADGKTLYVSNSLDGGISAIDTATGKVKNRLLFSERNEKGFPYGARQLLLLNNTLYVGAVADPAQIWVVDAXTMKLKTRIKNTGKWMTGLHYSAQTGRVYAANGSGEILVINPRNQRIEQRWKPLGDKPALLLNMAEDSDTGRLFVTDNSKAKTTLVLDIHSGKLLKQLEVGDSLAVQFNGKRHEIYISQRESGKVISLDDSRYTLKKSWALPANPNSLLLSADGQTLFVTVKQPFNKDHSTKGPDSVVRIDLNEQ

SEQ ID NO: 6363 - DNA, 1116 bp, Enterobacter cloacae
  misc_feature (253)..(253): n is a, c, g or t
gtgaaaagaaaaaccggtttcttctttgatgaacgttgtttctggcacagtaccggcctgcacgcggtaacgctgccggtcggtggttgggtgcagccgccggctggcggcggccatgccgagtcgccggagaccaaacggcggatgaaaaacctgatggacgtctccgggctgacgccgcagctggaactacgcagcgcggcggcggcgagccttgaggacctgcggcggatccatcctgatagctatcttnaacgttttaaggcaatcagcgataacggcggcggcatgctcggcaaagaagcgccgctggggccggggagttatgaaatcgcctgcctttccgccggactggcctgtgccgccgtggaagcggtgttgaaaggggagctggataacgcctattcactgtcgcggccgccaggacaccactgcctgccggaccagtcgatggggttttgtttcctcgccaatattcccattgccgttgaacgggcgaaagcgttgctggggctcggcaaggtagcgattattgactgggacgttcaccacggtaacggtacacagcatatctatctgcagcgcgatgatgtgctgactatctcattgcatcaggatggctgcttcccgcctggctactccggggaggacgatcgcggcgttggcgcgggcgaaggttacaacatcaatattccgctgctggccggggcgggcgacgacagctggcgctatgcgctggaaactatcgtcattcccgcgctggcgcgttttgaaccggagttgatcattgtcgcctgcggctatgacgccaacgcgatggatccattagcgcggatgcagctacatagcgacagcttccgcgcgatgaccgaacaggtccagcaggcggcggatcgactatgcggcgggaaactggtgatggtgcatgaaggcggctacgccgagtcctacgtgccgttttgcggcctggcggtgatggaaacgctgagcggggtgcgcaccgaggttcaggatccgctgctggaatttattcagcagcagcagccgcgcgccgcattcgcgcagttccagcgccaggccatcgatcggctggcgcagcagtttggtctgctataa

SEQ ID NO: 6364 - protein, 371 aa, Enterobacter cloacae
  misc_feature (85)..(85): Xaa can be any naturally occurring amino acid
MKRKTGFFFDERCFWHSTGLHAVTLPVGGWVQPPAGGGHAESPETKRRMKNLMDVSGLTPQLELRSAAAASLEDLRRIHPDSYLXRFKAISDNGGGMLGKEAPLGPGSYEIACLSAGLACAAVEAVLKGELDNAYSLSRPPGHHCLPDQSMGFCFLANIPIAVERAKALLGLGKVAIIDWDVHHGNGTQHIYLQRDDVLTISLHQDGCFPPGYSGEDDRGVGAGEGYNINIPLLAGAGDDSWRYALETIVIPALARFEPELIIVACGYDANAMDPLARMQLHSDSFRAMTEQVQQAADRLCGGKLVMVHEGGYAESYVPFCGLAVMETLSGVRTEVQDPLLEFIQQQQPRAAFAQFQRQAIDRLAQQFGLL

SEQ ID NO: 6365 - DNA, 1701 bp, Klebsiella aerogenes
  misc_feature (1031)..(1031): n is a, c, g or t
atgagattattaaatcgtttaaatcagtaccagcgcctttggcagccgtcgtccggcgctccgcagcaggtgaccgttggcgagctggctgaacgctgcttttgtagcgagcgccatatccgtacgctgttgcgccaggctcaggaggccggctggttaagctggcaggccagctccgggcgcggcaagcgcggaatgctctgtttttacaaaaccccggaaagtttgcgtaacgagatgatggaacaggcgctgaataagggtcagcaacaaaacgcgctggagctggcgcagctggcgccggttgagctgaaagcgttgttgcaccccttcctcggcggccagtggcaaaacaataccccgaccctgcgtattccttactatcgtccgctggaaccgctgcgccccggttttcttcccgggcgcgcagaacaacatttggccgggcagatctattccggcctgacgcgtttcgacgatagcgacaatacgccggtgggcgatctggcacaccactggcaggtatcacccgatgggctgcgctggcacttttatatccgctctaccctgtgttggcataacggcgataccgtgaaaacctcacagctgcagcaaagactactgttgctcctggaactcccggctctccgcaccctctttgccagcatcagccgtatcgatgtcacccacgcccaatgtttgacgattacgctgcatcgcccggactactggctaccgttccgtttagccagctattgcagcgtgctggcgcatcctgatgatccggcgctcggtagcggtccgttccgaataaagctttttggcccggatctggtccggctggagaaccatccccgctaccatttacagcatccgctgatccaggcggtagaatattggatcacgccgcagctattcgaaagcgatctcggcaccagctgtcgccatccggtacagatcaccatcggcgatcccgaagagctcaataatttgcgccaggtgagcaacagcatcagcctcggtttctgctntttgaccctgcgtcagagtccacgtctcagtaaagcgcaggcccagcggctgatttcgattatccaccgctcgtcgttgctggaaacgctaccgctggacgaagatctgatcacgccgagccatgaggtactgcccggctggtccattcctcagggcccggaaaaccatgaggtgccgctgcctcgccagcttaccctgctctatcatttgccggtcgaattacacactatggctgagcagctgaaacggcgcctcgcctctctcggctgcgaactgacgctcatttttcacgacgccaaaaattgggacggctgccgatatctggcacaggccgatatgatgatgggcgatcgcctgattggcgaagcgccggaatatacccttgaacagtggctacgctgcgacacgctatggcctaatttgctgaccggggcgcaatatgcgcatctgcaggcaacattagatgccgtgcaggcgcagcccgaagcgcgtagccgcaacgatgccctgcgcaacgtcttcaatacgctgatggatgacgccatcatgacgccgttattcaaatacaattaccgcatcagcgcaccgccgggtgttaacggcctgcgccttaatgccagagggtggttcgactttgccagcgcctggctaccggcatcatcggcgtga

SEQ ID NO: 6366 - protein, 566 aa, Klebsiella aerogenes
  misc_feature (344)..(344): Xaa can be any naturally occurring amino acid
MRLLNRLNQYQRLWQPSSGAPQQVTVGELAERCFCSERHIRTLLRQAQEAGWLSWQASSGRGKRGMLCFYKTPESLRNEMMEQALNKGQQQNALELAQLAPVELKALLHPFLGGQWQNNTPTLRIPYYRPLEPLRPGFLPGRAEQHLAGQIYSGLTRFDDSDNTPVGDLAHHWQVSPDGLRWHFYIRSTLCWHNGDTVKTSQLQQRLLLLLELPALRTLFASISRIDVTHAQCLTITLHRPDYWLPFRLASYCSVLAHPDDPALGSGPFRIKLFGPDLVRLENHPRYHLQHPLIQAVEYWITPQLFESDLGTSCRHPVQITIGDPEELNNLRQVSNSISLGFCXLTLRQSPRLSKAQAQRLISIIHRSSLLETLPLDEDLITPSHEVLPGWSIPQGPENHEVPLPRQLTLLYHLPVELHTMAEQLKRRLASLGCELTLIFHDAKNWDGCRYLAQADMMMGDRLIGEAPEYTLEQWLRCDTLWPNLLTGAQYAHLQATLDAVQAQPEARSRNDALRNVFNTLMDDAIMTPLFKYNYRISAPPGVNGLRLNARGWFDFASAWLPASSA

SEQ ID NO: 6367 - DNA, 1203 bp, Klebsiella aerogenes
  misc_feature (31)..(31): n is a, c, g or t
atgcgcatccttcatacctccgactggcacntcggccagaacttctatagcaaaagccgcgcggacgaacacgccgcctttctcgactggctgctggcgcgcgcgcaggaacacgaggtggatgccattatcgtcgctggcgatatttttgataccggctctccgccgagctacgcccgcgaactgtataaccgttttgtcgttcaactgcagcaaaccggctgccagttggtggtgctggcgggcaaccacgattcggtggcgacgttaaacgagtcgcgcgaaatactcgccttcctgaaaaccaccgtggtcgccaacgccggccacgcgccctttatcttgccgcggcgcgacggcgcgcccggcgcggtcttctgcccggtgccgtttttgcgcccgcgcgaactggtggtcagccaggctggccactccagcggcgaaaaacagcagcagttgctcaccgccatcagcgactactatcagcagcaatatcagcaggcctgcgatctgcgcggcgaacgggcactaccgattattgccagcggccacctcaccaccgtcggcgccagcaaaagcgacgcggtccgtgaaatctatatcggcaccctcgacgccttcccggccaaccgctttccgcccgccgattacatcgcgctcggccatattcatcgcgcccagttggttggcggctgcgagcatattcgctacagcggttcgccgctgccgctgagttttgatgaaaccggaaaaaacaaaagcgttaatctggtctcattcagcgagggcaagctcagtgaagtcaccccgctaacggtgccgatcacccagccgctggcggtactgaaaggcgatttcgccagcatcaccgaacaacttcagcagtggcaggatagcgcgcagcagccgccggtatggctggatatcgaaatcaccagcgatgaatacctgcacgatatccaaagaaaaattcagcagcagaccgaatcgctgccggtggaagtgttgctggtgcgtcgcagtcgcgcccagcgtgaacgcattctggccggcgttcagcgggaaacgctgagcgaactgcaggtcgaagaggtgtttgcccgccgcctggcgctggaaactcttgatgctccacagcaacagcggctggagcaactgtttacggaaacgctgcatagcctgaacggtgaggaacgcctgtga

SEQ ID NO: 6368 - protein, 400 aa, Klebsiella aerogenes
  misc_feature (11)..(11): Xaa can be any naturally occurring amino acid
MRILHTSDWHXGQNFYSKSRADEHAAFLDWLLARAQEHEVDAIIVAGDIFDTGSPPSYARELYNRFVVQLQQTGCQLVVLAGNHDSVATLNESREILAFLKTTVVANAGHAPFILPRRDGAPGAVFCPVPFLRPRELVVSQAGHSSGEKQQQLLTAISDYYQQQYQQACDLRGERALPIIASGHLTTVGASKSDAVREIYIGTLDAFPANRFPPADYIALGHIHRAQLVGGCEHIRYSGSPLPLSFDETGKNKSVNLVSFSEGKLSEVTPLTVPITQPLAVLKGDFASITEQLQQWQDSAQQPPVWLDIEITSDEYLHDIQRKIQQQTESLPVEVLLVRRSRAQRERILAGVQRETLSELQVEEVFARRLALETLDAPQQQRLEQLFTETLHSLNGEERL

SEQ ID NO: 6369 - DNA, 852 bp, Citrobacter rodentium
  misc_feature (353)..(353): n is a, c, g or t
atgagtgaacgtctgagcattaccccgttggggccgtatattggcgcgcaggtggccggagccgatttgacccgtccgttaagcgataatcagtttgagcagctataccacgcggtgctgcgtcatcaggtggtgttcctgcgcgagcaaaatatcaccccgcaacagcagcgcgatctggcgttacgttttggcgatttgcatatccatccggtctatccgcatgcgccgggcgtggatgaaattatcgtgctggatacccataacgataatccgccggacaacgataactggcataccgacgtgacctttatcgatacgccgccggcgggggcgattctggcggcgaaggngttaccttctaccggcggcgataccctgtggaccagcggtattgccgcctgggaagcgttatccgaaccgttccgccagctgttgagcgggttacgcgcggagcacgatttccgcaaatcgttccaggagtacaaatacaacaagacgcaagcggagcatcagcgctggcgcgaggcggtggcgaagaacccgccgctgttgcacccggtggtacgtacccatccggtaaccggtaagcaggcgctgttcgtcaatgaagggtttaccacccgtattgtggatgtcagcgagaaagagagcgaggcgctgctgaatttcctgtttgctcacgtcacaaaaccggaattccaggtgcgctggcgctggcagccgaacgatgtggcgatttgggataaccgggtgacgcagcattacgccaacgccgactatctgccgcagcggcgcatcatgcaccgcgcgacaattcttggcgataagccgttctaccgggcgggataa

SEQ ID NO: 6370 - protein, 283 aa, Citrobacter rodentium
  misc_feature (118)..(118): Xaa can be any naturally occurring amino acid
MSERLSITPLGPYIGAQVAGADLTRPLSDNQFEQLYHAVLRHQVVFLREQNITPQQQRDLALRFGDLHIHPVYPHAPGVDEIIVLDTHNDNPPDNDNWHTDVTFIDTPPAGAILAAKXLPSTGGDTLWTSGIAAWEALSEPFRQLLSGLRAEHDFRKSFQEYKYNKTQAEHQRWREAVAKNPPLLHPVVRTHPVTGKQALFVNEGFTTRIVDVSEKESEALLNFLFAHVTKPEFQVRWRWQPNDVAIWDNRVTQHYANADYLPQRRIMHRATILGDKPFYRAG

SEQ ID NO: 6371 - DNA, 933 bp, Klebsiella aerogenes
  misc_feature (539)..(539): n is a, c, g or t
atgccgcagaataatccgctaaccgcaatccttgaaacgcaaccgttcgtgctgctggatggcgcgatggcgacggagctggaagcgcgcggctgcaatctggccgatagtttatggtcggcgaaggtactgctggagaatccgcagctgatccgcgatgtgcatctcgactatttccgcgctggcgcacaggtggcgatcaccgccagctatcaggcaacgccggcaggctttgccgcccgcgggctggatgaggcgcagtcgaaggcgctgataggtaaaagcgtcgagctggcgcgtaaagcccgcgaggcgtatctggcggaaaacccgcaggcgggaacgttgctggtggccgggtcggtcgggccgtatggcgcgtatctggcggatggctccgagtatcgcggcgattatcagcgcagcgcggaggcgtttcaggcgttccaccgcccgcgcgtcgaagcgctgctggatgccggggcggacctgctggcctgtgaaacgctaccgtcgtttgccgaaatcacggccctggnggcgctgctgcgtgactacccgcgcgcccgcgcctggttctcattgaccctgcgcgacgccgaacatctcagtgacggcacgccgctgcgcgagggtgttgcggtattggccgataatccccaggtgctggcgctggggattaactgtatcgcgctggaaaataccaccgccgcgctgcagcatctgcacagcctgacgtcgctgccgctggtggtctatcctaactccggcgagcactatgatgcgctgaccaagacctggcatcatcacggtgaagcctgcgcgacgcttgcggcctatttgccgcagtggctggcggctggcgccaggctgattggcggctgttgtcgcaccacgccgcaggatatcgccgcgctggcggcgggccgctaa

SEQ ID NO: 6372 - protein, 310 aa, Klebsiella aerogenes
  misc_feature (180)..(180): Xaa can be any naturally occurring amino acid
MPQNNPLTAILETQPFVLLDGAMATELEARGCNLADSLWSAKVLLENPQLIRDVHLDYFRAGAQVAITASYQATPAGFAARGLDEAQSKALIGKSVELARKAREAYLAENPQAGTLLVAGSVGPYGAYLADGSEYRGDYQRSAEAFQAFHRPRVEALLDAGADLLACETLPSFAEITALXALLRDYPRARAWFSLTLRDAEHLSDGTPLREGVAVLADNPQVLALGINCIALENTTAALQHLHSLTSLPLVVYPNSGEHYDALTKTWHHHGEACATLAAYLPQWLAAGARLIGGCCRTTPQDIAALAAGR

SEQ ID NO: 6373 - DNA, 861 bp, Citrobacter koseri
  misc_feature (791)..(791): n is a, c, g or t
ttgtgggagcgtgataaacacaaaacaaaacagggattcaggggaatgatgatgcataaaacttataccaaaatcgcttttgcgctgggcgcgctgctgctgaccgcccaggttcaggccgaccagttagccgatatcaaagccgccggggtggtgaaggtcgccaccttcgacgctaacccgccgtttggttccgtggatgccaaaacccatcaactggtgggttacgacgtcgatttcgcgcaggcgctggcgaaatctcttggcgtcaagcttgagctggtggccactaacccggctaaccgtattcctctgctgcagtccggtaaggccgacctgatcgtcgccgatatcaccattaccccggagcgtgcgcaggtcattgatttctcaacgccctactttgtgaccggccagcagttcctggttccggctaagtcgccggataaactggatgactacagcaaagcgcgcatcggcgcggtaaaaggcaccaccggcgaacaggcgctgcaccagcgcttcccgcagtcgcgggtgctctcctatgacgatattccattggcgctgaccgccctgcgaaacggcaacgtgcaggcgataacccaggacagcaccattctcgccgggctgctggcgggcgcgccggataaagccaactttaaaattctgccggatttgctgagcaaagaagagattggcgtcggtgtgaaaaaaggcgagccggcgctgctgaaagcggtgaacgacgagctggttaagctggaaaaatccggccaggcggcgaaaanctacgacacctggtttggccctggcaccgcctctccgcagccgcgcgcctttaccatagaagcgaaataa

SEQ ID NO: 6374 - protein, 286 aa, Citrobacter koseri
  misc_feature (264)..(264): Xaa can be any naturally occurring amino acid
MWERDKHKTKQGFRGMMMHKTYTKIAFALGALLLTAQVQADQLADIKAAGVVKVATFDANPPFGSVDAKTHQLVGYDVDFAQALAKSLGVKLELVATNPANRIPLLQSGKADLIVADITITPERAQVIDFSTPYFVTGQQFLVPAKSPDKLDDYSKARIGAVKGTTGEQALHQRFPQSRVLSYDDIPLALTALRNGNVQAITQDSTILAGLLAGAPDKANFKILPDLLSKEEIGVGVKKGEPALLKAVNDELVKLEKSGQAAKXYDTWFGPGTASPQPRAFTIEAK

SEQ ID NO: 6375 - DNA, 567 bp, Enterobacter cloacae
  misc_feature (541)..(541): n is a, c, g or t
atgaagcccaaactcacccacgctttattacttgttcctttattgattttggcaggatgttcatcttccccaaaaaaaccgcccaaggcggtggcgcagcatcattatgagccaatcgacagcggctccgacgatctgataccggtgctggccgccctgcacgatcagatgcacacctgggacggcaccccttatgaatggggcggcaccgaccagagcggcgtcgactgttccggctttgtctggcgtacgctgaaggaccgcttcaatttgccaatggaccgcgtgaccaccggcgatcttctgcatatgggggtgcgggttagcaagcagcagttgcgacctggcgatttagtcttcttccgcattcacggcggcatgcacgtcggtttctacgatactgaccacaacttcctgcacgcctccgccagccagggcgtcatgcgttcgtcgctggataatccgtactggaaccgcgtattttatcaggcgcggcgcttgccgaaggaatataacgcgcagatcaccatgaataacgacnatctgcatctggcgaaaaaccgctaa

SEQ ID NO: 6376 - protein, 188 aa, Enterobacter cloacae
  misc_feature (181)..(181): Xaa can be any naturally occurring amino acid
MKPKLTHALLLVPLLILAGCSSSPKKPPKAVAQHHYEPIDSGSDDLIPVLAALHDQMHTWDGTPYEWGGTDQSGVDCSGFVWRTLKDRFNLPMDRVTTGDLLHMGVRVSKQQLRPGDLVFFRIHGGMHVGFYDTDHNFLHASASQGVMRSSLDNPYWNRVFYQARRLPKEYNAQITMNNDXLHLAKNR

SEQ ID NO: 6377 - DNA, 756 bp, Enterobacter cloacae
  misc_feature (523)..(523): n is a, c, g or t
atgaatcttatcagtattcctgcatttcaggacaactacatctgggttgttagcgacgatagccgtcgttgtgtgatagtcgatcccggtgaaaccgcgccggtactcgcggccattgaagaaaacaactggcagccagaagcgattttgttaacccaccaccaccatgatcatgttggcggcgtgaaagaactgcggcaaaaatttccgcaacttgtggtttacgggccggcagaaacccaggataagggaagcacggatattgtatctgatggcgatagcattactcttttgggtcacgaattttctattttcgccacgccaggtcacacattaggacatatctgtttctacagcaaaccttatctattttgtggcgatacaatgttttccggcggctgcggcaggctgttcgaaggtacagcagatcaaatgtatcaatcatttatgaaaataaatgcccttccagctgacaccctaatttgttgcgcacatgagtacactttagcaaacatgaagtttncattgagtatcctgccagatgatatggatataaaggattactaccataaagttaaggagttacgcgcaaaaaaccaaaagacactacccgttactctgaaaaatgaacgccgtataaatatatttttacgtacggatgacaatgatttaattaaagaaatatccaaagaaacaaatttgcaacactcagcgcagagatttgcatggttaaggtcaaagaaagatgacttctga

SEQ ID NO: 6378 - protein, 251 aa, Enterobacter cloacae
  misc_feature (175)..(175): Xaa can be any naturally occurring amino acid
MNLISIPAFQDNYIWVVSDDSRRCVIVDPGETAPVLAAIEENNWQPEAILLTHHHHDHVGGVKELRQKFPQLVVYGPAETQDKGSTDIVSDGDSITLLGHEFSIFATPGHTLGHICFYSKPYLFCGDTMFSGGCGRLFEGTADQMYQSFMKINALPADTLICCAHEYTLANMKFXLSILPDDMDIKDYYHKVKELRAKNQKTLPVTLKNERRINIFLRTDDNDLIKEISKETNLQHSAQRFAWLRSKKDDF

SEQ ID NO: 6379 - DNA, 564 bp, Klebsiella aerogenes
  misc_feature (338)..(338): n is a, c, g or t
atgcagttgaatggcggatggctggtgggcgcgcgtcgggtgccttcgccgcatcacgattgccgcccggacgatgaaaacccttctttactggtggtacataatatcagcctgccgcctggggagtttggcggcccgtggattgacgcgctatttaccggtacattggatgccgacgcgcatccttacttcgccgggattgctcatctgcgcgtttcggcgcattgtctgattcgccgcgatggcgagatagtccagtatgtaccctttgataagcgcgcatggcatgcgggcgtctccagctatcacggccgcgagcgctgcaatgatttttcgancggtattgagctggaagggacggatactcaggcctacaccgaggcgcagtaccagcagttagtggtgattacccaggcgctcatccagcgttatcctggtattgctgataatattaccggccattgcgatatcgcgccgatacgtaaaacggatcccggcccggcctttgattgggcaaaataccgcggtatgttggccgcatcgtcacataaggagataccatga

SEQ ID NO: 6380 - protein, 187 aa, Klebsiella aerogenes
  misc_feature (113)..(113): Xaa can be any naturally occurring amino acid
MQLNGGWLVGARRVPSPHHDCRPDDENPSLLVVHNISLPPGEFGGPWIDALFTGTLDADAHPYFAGIAHLRVSAHCLIRRDGEIVQYVPFDKRAWHAGVSSYHGRERCNDFSXGIELEGTDTQAYTEAQYQQLVVITQALIQRYPGIADNITGHCDIAPIRKTDPGPAFDWAKYRGMLAASSHKEIP

SEQ ID NO: 6381 - DNA, 1206 bp, Enterobacter cloacae
  misc_feature (440)..(440): n is a, c, g or t
atggcgactaagcagctttggcagtggcgcgggatggataagcaaggaatgccgtgcgaaggagcactctggcaagagacgcgcgcgcaggcgctggcatcactggaacagcagcggatactgctgctggcgctgcggcgccaaacggtacagggttcactgtggcgtccgcgctatagctgcgagattatccgccagcttgccacgctgctgcaggctggcttaccgctggccgaagggctggagctgctggcccaacaacagccgcacaaacagtggcaggcgctgctgcgaatgctggcgcaggaactggcgcagggtgtttctctctccagcgccctgacgcaatggccgcgggtctttccgccgctctatctggcgatgatccgcaccggcgagctcaccggtaagctggaacgctgctgctttcagctcgcgcnacagcagcaggaacagcagcgtctgacagaaaaggtaaagaaggcgctgcgctacccaatggtgattctgactttggcgctggcggtggtcatagcaatgttgtttttcgtgctgccggaattcaccgctatctatcggaccttcaatacgccgctccccttgctgacgcaaatggtcattcacatcggcgatgcgttggcccgctactggccgttgctgccgccgctttttgctattccgctatctctcaaccgactggcccggcatcggccacgctggctgctgttaaggcaaaagttactacacgcgattccgattgccggtcgcctaatcaacggccaacagctaagccagatatttaccattctttcactgacccaaagcgcgggtataagctttgtccaggggctggagagcgtggaggaaaccatggggtgcccgctgtggcggcagcggattgcacaggcgcgcgcagatatcatccacggccaaccaatctggcaggcgctaacgaattgcggcggattcaccttactgtgtctgcagctcattcgtaccggcgaggcatcgggagcgctggatacgatgctcgataacctggcgcgccatcatagcgagcaaactcatcaacaggcggataatctggcgacgctgctggagccattactgctgggggtgaccggaacgatcgtcggcgtgctggtggtggcaatgtatctccccatttttcatttgggagacgcactcggcgggatgggaagttaa

SEQ ID NO: 6382 - protein, 401 aa, Enterobacter cloacae
  misc_feature (147)..(147): Xaa can be any naturally occurring amino acid
MATKQLWQWRGMDKQGMPCEGALWQETRAQALASLEQQRILLLALRRQTVQGSLWRPRYSCEIIRQLATLLQAGLPLAEGLELLAQQQPHKQWQALLRMLAQELAQGVSLSSALTQWPRVFPPLYLAMIRTGELTGKLERCCFQLAXQQQEQQRLTEKVKKALRYPMVILTLALAVVIAMLFFVLPEFTAIYRTFNTPLPLLTQMVIHIGDALARYWPLLPPLFAIPLSLNRLARHRPRWLLLRQKLLHAIPIAGRLINGQQLSQIFTILSLTQSAGISFVQGLESVEETMGCPLWRQRIAQARADIIHGQPIWQALTNCGGFTLLCLQLIRTGEASGALDTMLDNLARHHSEQTHQQADNLATLLEPLLLGVTGTIVGVLVVAMYLPIFHLGDALGGMGS

SEQ ID NO: 6383 - DNA, 936 bp, Klebsiella oxytoca
  misc_feature (535)..(535): n is a, c, g or t
atggaaaacttagatgtcattaccattggcgaagccatggcgatgtttgtcgccaccgaaaccggcgaactggcggaggttgaacgctttatcaaacgcgtcgccggcgctgaactgaacgtggcgaccggcctggcgcgcctggggctgaaggtgggctgggtgagccgcgtcggcaacgatagctttggccgcttcgtgctgaattcgctggccaaagaaggcatcgacgcgcgcggcgtggccattgacgagcgctacgctaccggcttccagatgaaatctaaagtcgaaaatggaaccgatcccatcgtggaatatttccgtaaaggatcggctgccagccatctgtcgacggaagatttccgcgctgattacttcaccagcgcccgccatttgcacttaagcggcgtcgccgccgcgctgtccgacagttcgtatgcattgctggaacatgcggccaacgtgatgaaagccgaagggaaaaccctctcttttgacccaaacctgcgcccggtactgtggaaaagcgaanccgagatggtggagaaactgaaccgcctcgccttccaggctgactgggttttgccaggcttaaaagagggcgtgattcttaccggccagcagacgccggaaggtatcgctgatttctatctgtcgcgcggcgttaaggcggtggtgattaaaaccggctgcgacggcgcatggttcaagaccgccaacggcgaacagggcgccatcgcagccattaaagtcgacaacgtggtggacaccgtcggcgcgggtgatggctttgccgttggcgtaatcagcgcgctgctggaaggcaaaacgctgacgcaagccgtgaaccgcggtaacaaaattggctcgctggccattcaggtacagggcgatagcgaagggctgcccacccgcgaagcgctgggcgaataa

SEQ ID NO: 6384 - protein, 311 aa, Klebsiella oxytoca
  misc_feature (179)..(179): Xaa can be any naturally occurring amino acid
MENLDVITIGEAMAMFVATETGELAEVERFIKRVAGAELNVATGLARLGLKVGWVSRVGNDSFGRFVLNSLAKEGIDARGVAIDERYATGFQMKSKVENGTDPIVEYFRKGSAASHLSTEDFRADYFTSARHLHLSGVAAALSDSSYALLEHAANVMKAEGKTLSFDPNLRPVLWKSEXEMVEKLNRLAFQADWVLPGLKEGVILTGQQTPEGIADFYLSRGVKAVVIKTGCDGAWFKTANGEQGAIAAIKVDNVVDTVGAGDGFAVGVISALLEGKTLTQAVNRGNKIGSLAIQVQGDSEGLPTREALGE

SEQ ID NO: 6385 - DNA, 2448 bp, Klebsiella oxytoca
  misc_feature (1841)..(1841): n is a, c, g or t
atgaatgcaccctttagttatgcatcacccacgctgagcgttgaggcgttaaagcattctatcgcgtataagctgatgtttatcatcggcaaagatccggcgatcgccaacaaacacgaatggctgaacgccaccctgttcgccgttcgcgaccgcatggtcgagcgctggctgcgttcaaaccgcgcccagctgtcgcaggaagtgcggcaggtttactatctgtcgatggagtttttgattggccgcaccctctctaacgcgctgctgtcgttagggatttatgaagatgtgaataatgcgctggccgatatggggctcgatctggaagagcttattgatgaagaaaacgaccccggtttaggcaacggcggtttagggcgcctggccgcctgcttcctcgattctctggcgacactgggcctgccgggccgcggctacggtatccgctacgactatgggatgtttaaacagaacattgtcgacgggcggcagaaagagtcgccggattactggctggagtacggcaacccgtgggagttcgaacggcacaatacgcgctataaagtgcgtttcggcggccgcgtgcagcaggaagggaaaaatacccgctggatagagaccgaagagattatcgccgaagcctacgatcagattatccccggtttcgataccgatgccactaacaccctgcgtctgtggagcgcgcaggccagtagcgaaatcaacctcggtaaattcaaccagggcgactactttgcggcggtggaagataagaaccactccgagaacgtttcgcgggtgctgtacccggatgactccacctattccgggcgcgagctgcgcctgcgtcaggagtatttcctggtctcggcgacggtgcaggatatcctcagccgccactaccagctgcaccgcacctacgacaatctggcggcgaaaatcgccattcacctcaatgacacccacccggtgctgtcgattcctgagctgatgcgtctgctgatcgatgagcacaaatttagctgggatgaagccttcgaggtgacctgccaggtcttctcctataccaaccatacgttgatgagcgaagcgctggagacctggccggtcgatatgctggggaaaatcctgccgcgccatctgcagattatcttcgagattaacgattacttcctcaagacgctgcaggagcagtatcccaacgataccgcgctgctgagccgtacctcgatcattgatgaatccaatggtcgccgggtgcgcatggcgtggctggcggttgtcgtcagccataaagtcaacggcgtgtccgagctgcattcgcgcttaatggtcgagtcgctgtttgccgagtttgcgaagattttcccgatgcgctttaccaatgtcaccaacggcgtcacgccgcggcgctggctggcgttggcgaacccgccgctgtcgcaggtgctggatgagaatatcggccacacctggcgcaccgacttaagccaactaagcgatctgcagcagcatattgattatccgacggtgaaccaggcggtgcgccgcgccaagcttgagaataagcagcggctggcgaactatatcgcccagcagttgaacgtggtggtcaatcctaaggcgctgtttgatgtgcagatcaaacgcatccacgaatataaacgccagctgatgaatatcctgcacgtcatcacccgctacaatcggatcaaagccgatccgcaggcggagtgggtgccgcgggtgaatatcttcgccggcaaggccgcgtcggcttactacatggcgaagcatattattcatctgatcaacgatgtggcggcggtggtgaacancgatccgcagattggcgataagctaaaagtggtgtttatccccaactacagcgtgagcctggcgcagctgattatcccggcggcggatctctccgagcagatttcgttggcgggaacggaagcgtccggtaccagcaatatgaagtttgcgctcaacggcgcgctaaccattggtacgctggatggcgctaacgttgaaatgctggagcacgtcggcgaggacaatatctttatcttcggtaataccgcggaacaggtagaagccctgcgcagtaacggctataaaccgcgcgactattatgagcaggatgaggagctgcatcaggcgttgacgcagattggcaccggcctgttcagtccttcggagcctggccgctaccgcgacctgctggattcgctgatcaactttggcgaccactatcaggtactggcggactaccgcagctacgttgattgccaggataaggtggacgagctgtaccgccatccggaggagtgggccaataaagcgatgatgaacatcgccaacatgggctatttctcatccgaccgcacgatccaggagtacgccaaacatatctggcatatcgacccggttcgtttgtaa

SEQ ID NO: 6386 - protein, 815 aa, Klebsiella oxytoca
  misc_feature (614)..(614): Xaa can be any naturally occurring amino acid
MNAPFSYASPTLSVEALKHSIAYKLMFIIGKDPAIANKHEWLNATLFAVRDRMVERWLRSNRAQLSQEVRQVYYLSMEFLIGRTLSNALLSLGIYEDVNNALADMGLDLEELIDEENDPGLGNGGLGRLAACFLDSLATLGLPGRGYGIRYDYGMFKQNIVDGRQKESPDYWLEYGNPWEFERHNTRYKVRFGGRVQQEGKNTRWIETEEIIAEAYDQIIPGFDTDATNTLRLWSAQASSEINLGKFNQGDYFAAVEDKNHSENVSRVLYPDDSTYSGRELRLRQEYFLVSATVQDILSRHYQLHRTYDNLAAKIAIHLNDTHPVLSIPELMRLLIDEHKFSWDEAFEVTCQVFSYTNHTLMSEALETWPVDMLGKILPRHLQIIFEINDYFLKTLQEQYPNDTALLSRTSIIDESNGRRVRMAWLAVVVSHKVNGVSELHSRLMVESLFAEFAKIFPMRFTNVTNGVTPRRWLALANPPLSQVLDENIGHTWRTDLSQLSDLQQHIDYPTVNQAVRRAKLENKQRLANYIAQQLNVVVNPKALFDVQIKRIHEYKRQLMNILHVITRYNRIKADPQAEWVPRVNIFAGKAASAYYMAKHIIHLINDVAAVVNXDPQIGDKLKVVFIPNYSVSLAQLIIPAADLSEQISLAGTEASGTSNMKFALNGALTIGTLDGANVEMLEHVGEDNIFIFGNTAEQVEALRSNGYKPRDYYEQDEELHQALTQIGTGLFSPSEPGRYRDLLDSLINFGDHYQVLADYRSYVDCQDKVDELYRHPEEWANKAMMNIANMGYFSSDRTIQEYAKHIWHIDPVRL

SEQ ID NO: 6387 - DNA, 2319 bp, Enterobacter cloacae
  misc_feature (2263)..(2263): n is a, c, g or t
atgaaaaaattaaccgttggtttaattggtaatcctaattccggcaaaacaacgttatttaatcagctaaccggcgcgcgccagcgggtgggtaactgggcgggggtcaccgttgagcgtaaagaaggcgccttcaccaccaccgaccaccaggttactctggttgacctgccgggcacctattcgctgaccaccatctcctcgcaaacatcgctcgatgaacaaattgcctgtcactatattctcagcggcgatgccgacctgctgattaacgtcatcgacgcctcgaacctggaacgtaacctctatctgactctgcagctgctggagttgggtattccctgcgtcgtcgcgctaaacatgctcgatattgccgaaaaacagcaaatccgcatcgacgtcgacgcgctggcggcccgtctcggctgcccggtgattccgctggtctccacccgcggccgcggtattgaagcgctgaaaatggcgcttgaccgccatgagcaaaatcagccgctggaactggtgcactatccgcaatccctgcagcgcgaagccgatatgctggcgcaggcgatgcctgctgatatgccgctgcgtcagcgccgctggcttgggctgcagatgctggaaggcgatatttacagccgcgcctttgccggcaacgccgccgacaaactggatctggcgctggccaacctgagcggcgagatggacgatccggcgctctatatcgccgatgcccgctatcaaagtatcgccgcggtatgcgatgccgtcagtaacaccctgaccgctgagccgagccggttcaccacggcgatggataaaattatccttaaccgcttcctcggcttaccgatcttcctgttcgtgatgtacctgatgttcctgctggctatcaacatcggcggcgccctgcagccgattttcgacgccggctcggtggctatcttcattcatggcatccagtggctgggctacaccctgcacttcccggactggctgaccgtgttcctcgcgcaagggctgggcggcggtatcaacaccgtgctgccgctggtgccgcaaatcggcatgatgtacctgttcctctctttccttgaggactccgggtatatggcgcgcgcggccttcgtaatggaccgcctgatgcaggcgttaggcctgccggggaaatccttcgtgccgctgatcgtcggtttcggctgtaacgtgccttccgttatgggcgcccgtacgctggatgcgccgcgtgaacgcctgatgaccatcatgatggcgccatttatgtcctgcggcgcccgattggcgattttcgcggtcttcgccgccgccttcttcggccagaacggcgcgctggcggtcttctcactgtacgtactgggcatcgtgatggcgatcctcaccggcctgatgctcaaatacaccattatgcgcggcgaagcctcgccgttcgtgatggagctgccggtgtatcacgtaccgcacatcaagagcctggttatccagacctggcagcgcctgaaaggcttcgtcctgcgcgccggtaaggtcattgtgattgtcagtattttcctcagcgcgctgaacagcttctcgctcagcggcaaagtggtcgataacatcaacgactcggcgctggcttcggttagccgagtgattaccccggtgtttaagccgattggcgtgcatgaagataactggcaggcaaccgtcggcctgtttaccggcgcgatggcgaaagaagtggtggtcggtacgttgaacaccctctacaccgcggaagatatccagaatgaagagtttaacccacaggagtttagccttggcgacgagctgttagccgccgtcgatgaaacctggcaggggctgaaagacacctttagcctgagcgtgctggcgaacccgattgaagcaagcaaaggcgatggcgaaatggaaaccggcgccatgggggtgatgggcagtaaattcggcagcgccgccgccgcgtacagctacctgatcttcgtcctgctctatattccatgcatttccgtgatgggagcgattgcccgtgagtccagccgcggttggatgatgttctcggtgttgtggggattgaatatcgcctactcgctgtcgacgctgtactaccagaccgtgagctttagccaacacccgcgctacagcctggtatgcattctggcggtaattctgtttaacgtcgtggtctttggcctgttgcgtcgggcgcgtagccgggtggatgtttccctgctgncgacgcgtaaaaccccgacgtcctgctgccagagtccggccggcgactgccactaa

SEQ ID NO: 6388 - protein, 772 aa, Enterobacter cloacae
  misc_feature (755)..(755): Xaa can be any naturally occurring amino acid
MKKLTVGLIGNPNSGKTTLFNQLTGARQRVGNWAGVTVERKEGAFTTTDHQVTLVDLPGTYSLTTISSQTSLDEQIACHYILSGDADLLINVIDASNLERNLYLTLQLLELGIPCVVALNMLDIAEKQQIRIDVDALAARLGCPVIPLVSTRGRGIEALKMALDRHEQNQPLELVHYPQSLQREADMLAQAMPADMPLRQRRWLGLQMLEGDIYSRAFAGNAADKLDLALANLSGEMDDPALYIADARYQSIAAVCDAVSNTLTAEPSRFTTAMDKIILNRFLGLPIFLFVMYLMFLLAINIGGALQPIFDAGSVAIFIHGIQWLGYTLHFPDWLTVFLAQGLGGGINTVLPLVPQIGMMYLFLSFLEDSGYMARAAFVMDRLMQALGLPGKSFVPLIVGFGCNVPSVMGARTLDAPRERLMTIMMAPFMSCGARLAIFAVFAAAFFGQNGALAVFSLYVLGIVMAILTGLMLKYTIMRGEASPFVMELPVYHVPHIKSLVIQTWQRLKGFVLRAGKVIVIVSIFLSALNSFSLSGKVVDNINDSALASVSRVITPVFKPIGVHEDNWQATVGLFTGAMAKEVVVGTLNTLYTAEDIQNEEFNPQEFSLGDELLAAVDETWQGLKDTFSLSVLANPIEASKGDGEMETGAMGVMGSKFGSAAAAYSYLIFVLLYIPCISVMGAIARESSRGWMMFSVLWGLNIAYSLSTLYYQTVSFSQHPRYSLVCILAVILFNVVVFGLLRRARSRVDVSLLXTRKTPTSCCQSPAGDCH

SEQ ID NO: 6389 - DNA, 852 bp, Enterobacter cloacae
  misc_feature (656)..(656): n is a, c, g or t
atgttgcgcattgacgcccaccaccactactggcgctatcagccacaggattacccgtggattgatgacgacatgccgcaactgcgccgggatttttaccctccgcagctccagccgctgctggcgcagcaccggctcgatggcgcggtggtggtgcaggcgcgtcatgatgaaaacgaaaccgcctggctggtggcgcaggtttctcaggcggttggcgtatgcggcgtagtgggctggctggatattaccgccgcggatctcgaggacaagctgacgcagtggcgcgaccagctgtgcgggttgcgccatcaggtgcaggatgaagccgatccggcagcgtggcttgagcgcgaggcggtctcgcgaggaatgcagcagttgcagcgccagggctatagctgggatctgttggttacccatcgtcatctcgcggcggcggcacgctttgccgcccgccacgatgatcactggctggtactcgaccatttcggcaagccggatatcgcgcgcggcgcggcccattgggccgaacaggcgcggccgctggcggcgctaccgcacgtggcgcttaagctttctggtctggtgaccgaggccgcgggcggatgctggaccgagcagcaactgctgcctttcttcgacgccgcgctggngctgtttggcccgcagcggctgatgtttggttccgactggccggtatgcctgctggcggcggagtaccgccaggtttaccagctgtgcgaaacggcgctggccccgctgacggaaacgcagcggtcagctatctggggcggcactgcctgtcgggtttatggtttaacggaggcgaagcgtggatctatttcttaa

SEQ ID NO: 6390 - protein, 283 aa, Enterobacter cloacae
  misc_feature (219)..(219): Xaa can be any naturally occurring amino acid
MLRIDAHHHYWRYQPQDYPWIDDDMPQLRRDFYPPQLQPLLAQHRLDGAVVVQARHDENETAWLVAQVSQAVGVCGVVGWLDITAADLEDKLTQWRDQLCGLRHQVQDEADPAAWLEREAVSRGMQQLQRQGYSWDLLVTHRHLAAAARFAARHDDHWLVLDHFGKPDIARGAAHWAEQARPLAALPHVALKLSGLVTEAAGGCWTEQQLLPFFDAALXLFGPQRLMFGSDWPVCLLAAEYRQVYQLCETALAPLTETQRSAIWGGTACRVYGLTEAKRGSIS

SEQ ID NO: 6391 - DNA, 1224 bp, Enterobacter cloacae
  misc_feature (598)..(598): n is a, c, g or t
atgctagtgaataaaacggcggagccgctggcggcccgcgccggggcgacccctaatctgcgctgggcatttatgctggtcaccagcctgttctttatgtgggggctctcttacggcctgctcgatgttctcaataaacattttcaggagaccctgcacgtcaccaaagcgcagtccggtttactgcaggcggcctattttggcgcctacttcctggtagcgctgcccgccggctactttatggataaacgcggttataaagcggggatcctggtcggcttgtgcctgtatgcgcttggcgcgctgctgtttgtgccggcggcgagcgtgaatagctttgcgctgttcctgttcgcgctgtttgtgattgcctgtggattaggttgtcttgagaccgcggcgaacccttatgcgacggtacttggcgatagtaaaggcgctgagcggcggttgaatctggcgcagtcgtttaacggactggggcaatttattggcccgctgatcggcggcacgctgttcttttcagctactcagggcgataccggcgatcagagctcggtaaaaatcacctatgtcgctatcgccgtgctggtgctgnccatcgcgctgctgttccgccgcacgccgatgccggatattcgcgaagaggagggcagtcagcaagaagcggcgcaggggctgtggcagcatcgccactttaccggcggggttatcgcccagttcttttatgttgccgcgcaggtcggcgtgggtgcgttctttatcaactatgcgaccgagcactggcatggcgtgacaaaccagcacgcttcctatctgctgtcgattgcgatgattagctttatggtcggtcgtttcttcagtacctggctgatggggcgggtgcaggcggcgacgctgctgatggtgtattcgttggtcaatatcgtgctctgcggtctggtgatgatgagtatcgacggcgtgtcggtggtggcgctgattgcggtcttcttttttatgtcgattatgttcccgaccattttcgcgctgggcgttaaaaatatgggcagccataccaaacgcgccagctcgtttatgattatggccatcgtcggcggggcgattatgccttactttatgggggcgctggccgaccgctacagcaccgcgctggcctatgggttgccgctgctatgcttcctggtggtgctgtggtacggcatgagccaacgacgcgcgtaa

SEQ ID NO: 6392 - protein, 407 aa, Enterobacter cloacae
  misc_feature (200)..(200): Xaa can be any naturally occurring amino acid
MLVNKTAEPLAARAGATPNLRWAFMLVTSLFFMWGLSYGLLDVLNKHFQETLHVTKAQSGLLQAAYFGAYFLVALPAGYFMDKRGYKAGILVGLCLYALGALLFVPAASVNSFALFLFALFVIACGLGCLETAANPYATVLGDSKGAERRLNLAQSFNGLGQFIGPLIGGTLFFSATQGDTGDQSSVKITYVAIAVLVLXIALLFRRTPMPDIREEEGSQQEAAQGLWQHRHFTGGVIAQFFYVAAQVGVGAFFINYATEHWHGVTNQHASYLLSIAMISFMVGRFFSTWLMGRVQAATLLMVYSLVNIVLCGLVMMSIDGVSVVALIAVFFFMSIMFPTIFALGVKNMGSHTKRASSFMIMAIVGGAIMPYFMGALADRYSTALAYGLPLLCFLVVLWYGMSQRRA

SEQ ID NO: 6393 - DNA, 1227 bp, Klebsiella aerogenes
  misc_feature (957)..(957): n is a, c, g or t
atgaacctggccgcagcgcgagtgatggcgcgggcagagagattagcggcgataagcgaaacgccggaaggcctgacgcgggtttacctttcgccacagcatctcgacgctaatcagcaggttgcccactggatgcgccaggcaggcatgattgtctggcaggacagcgtcggtaatatttgcgggcgttatgaaggccgtgaagaaggggcgccggcgattttgctcggatcgcatctcgatacggtacgcaacgccgggcgatatgatggcatgttgggggtgttagccgccatcgaagtggtgcagagcttacataatcaggcgcgccgcctggcgcaggccatcgaaatcgtcggcttctgcgatgaagaaggaacacgctttggtatcacgttattgggcagcaagggtctgacgggaagctggccgcaaacctggctggcccaacgcgatgccgaaggcattagcctggcgcaggcgatggtcaacgccggattggatccatcacgcgtccattcagcctcgcgcccggcggaagatttttccgcctatctcgaactgcatatcgagcagggtccgaggctggaacaggccggttcggcactcggcgtggtcgaggcgatcaacggcgcgcggcgcctcaattgctgttttaccggcgaggcgggtcatgcaggcacggtgccgatggaccagcgccgcgacgcgcttgccgccgccgcggagtggatgctgtatattgagagcacgacgcgccagcagggaggcaacctggtcgccaccgtcgggacattgcgctgctcgccggcagcggtcaatgtgatccccggcgaagtcgcgttgactctggatatccgcggtccgcaggatcagccgctggatgcattactgggttcattgctggcggcagccgcagagattgccgggcgtcgcggcctgcagtttgccgctgangagttctaccgcattgcggcaaccgcctgcgatccgcgattacagtcggtgattgccgaagcgctatgcgaggtacagggcacggcgttgacgctgccaagcggcgccggacatgacgcgattgctatcgcggagcgctggccggtggggatgctgtttgtgcgctgcaaagggggaattagtcaccatccggcggaatcggtcagcgaagccgatgtcgaactggcaattgatgccttcagccgggcggtgataaaacttgccgggtaa

SEQ ID NO: 6394 - protein, 408 aa, Klebsiella aerogenes
  misc_feature (319)..(319): Xaa can be any naturally occurring amino acid
MNLAAARVMARAERLAAISETPEGLTRVYLSPQHLDANQQVAHWMRQAGMIVWQDSVGNICGRYEGREEGAPAILLGSHLDTVRNAGRYDGMLGVLAAIEVVQSLHNQARRLAQAIEIVGFCDEEGTRFGITLLGSKGLTGSWPQTWLAQRDAEGISLAQAMVNAGLDPSRVHSASRPAEDFSAYLELHIEQGPRLEQAGSALGVVEAINGARRLNCCFTGEAGHAGTVPMDQRRDALAAAAEWMLYIESTTRQQGGNLVATVGTLRCSPAAVNVIPGEVALTLDIRGPQDQPLDALLGSLLAAAAEIAGRRGLQFAAXEFYRIAATACDPRLQSVIAEALCEVQGTALTLPSGAGHDAIAIAERWPVGMLFVRCKGGISHHPAESVSEADVELAIDAFSRAVIKLAG

SEQ ID NO: 6395 - DNA, 2541 bp, Klebsiella aerogenes
  misc_feature (466)..(466): n is a, c, g or t
atgaaaatcattaaacccttacgcctgagcgtactgaaccggccattccgctggcagggcaaaaattatcttggcgtttcggtgctggcgttggcggatatggggccaaacccccagctgcgccccgagatggaactgtggcagcttgccgccgacgaactacaaaccagcggcggcgtggtggatatggccatccctaaagtccgcgccgaatttcttgccaccggttttgcctatacccatcatcagcaggaaaaaagcgcctgcgtggcgcgcatcgatatcgacaaactgagtaagtcgttggtggtgttcggcgatcgccagtggacggggcaacgtatgacccgaccgcagccgtttagcgaaatgcgcctcgactggagccgcgcctttggcggcggtgattatgccgacaacccgcacgggcttggtgtcgcgccggtaaaacagcaggggcgcgaanatcatcctctgccgaatattgaaccgctggagggaagagtaagctcgccgcagcagaaaccgcagccggcaagttttggcccgctggatattcagtggccgcggcgctttagccgtatgggcaaaaaatatgatgccagttggctacaacaggattttcccggttttgccagcgatattgactggaaagtctttaacgccgccagcccggaccaatggtgggaggatcgggataccttgccgccaggggcgaaatggcggatctggaatatgcatcctgagaaaccaatgcaggagggccagctgccgccgtggcaggctcgctgttttattcatcgccagcgcgcggatgaaacgctatttgaagaaattgccttacgcgccaccacggtatggttctttccccatcgggaacagatgatgcttatctggcaggggcacattcgtatcaatgaagacgatgccgccgacgtcctgcagctgatcccggcgctggaaaaagagggcgccgcccgttcgcttaatcactatcgcaaggtactggcccagcgaatggataaagagaagggcgcgctcttctccttccgcgaaaaggatctcataccggaagagaccatcggcccgtggatcgacaatgaaattgaacagtcgccgagtccgcagcaggagaatatgaaaaaccgcgcccgtctgctgcgtgaacagcaccgcgccgccattgaagccagcggcggtgatatcgatagcctgttggcggatatcgacgaacccacgttgcctaagcttgaagacctgccggagtttatcgccgacatggagcgtcaggcgcaggaaatggagaatgatgcacaacagcgcaagcgtgagatggaggcgcactatccgcagttgaataacgatgaaaaccaaccgcgcggccccgaatccatgcaccggatgcaggagatgctgcatcagcaccagcacgaactgagcgagaaaaagcgcgcgcaaacgcgcgaggcgctacatcagatgtacctggccgcggtgcagcatcagccgccggcggtccggctgaagggcgatctggcgatgatcctgcgccaacgcgccgagcgtaccatggcgcagggcggcaattttagcgggatggatctgaccggcgttgatttttccggcatggattttcgcggcgccaattttgaaaaggcgttactggaatgcgcggacctcagccactgtcagctggataacgcctcttttcagggggccgtgctggccagaacggagctacagcattcgtcgctgcgtaactgtgattttagcggcgccagcctggtactggcggagtgccatcaaagcgacttcaccggcgctcgctttgaagatagtcagctacagaacgcgctgtttgcgcaatgcattttcgataatgcgacgctaaaaacgctgatccttcgggaaatcagcctgattgactgccgttttcatcgcgccgagctggatggctgcgtctttatggaactgacgctggcacaacctgatttcagccacgcgcggctgcacaaatgctcgtttttacaatctgaactggagcatgccattttccatcaggcgacgctggaaagctgttctctggtgcagaccatcgcggagcgcgctgattttagcgctgcaacatggctagccagcgctgcggtgtcggaaagctcacttatcggcgccgacttcagccacgctacgctgcagcagagcaatttacgccagacgccattacagggcgcgcgctttgcgctggcaaaaatcgaaaacagcgatctgagtgaggcctattgccgtgatgccagctttatacgcgcgaatctggtcggcagtctgtttgttcgcaccgattttcgcgaggccgattttaccgacgccaatctgatgggcgcgttgctgcaaaaaagccagcttgccggagccaatttcgaaggcgccaacctgttccgcgccgatctttcacaatcctttaccagtaaaaccacgcggctggacggcgcatggaccaaacgcattaaaaccctgccgaagcgcgatggagaagtgatatga

SEQ ID NO: 6396 - protein, 846 aa, Klebsiella aerogenes
  misc_feature (156)..(156): Xaa can be any naturally occurring amino acid
MKIIKPLRLSVLNRPFRWQGKNYLGVSVLALADMGPNPQLRPEMELWQLAADELQTSGGVVDMAIPKVRAEFLATGFAYTHHQQEKSACVARIDIDKLSKSLVVFGDRQWTGQRMTRPQPFSEMRLDWSRAFGGGDYADNPHGLGVAPVKQQGREXHPLPNIEPLEGRVSSPQQKPQPASFGPLDIQWPRRFSRMGKKYDASWLQQDFPGFASDIDWKVFNAASPDQWWEDRDTLPPGAKWRIWNMHPEKPMQEGQLPPWQARCFIHRQRADETLFEEIALRATTVWFFPHREQMMLIWQGHIRINEDDAADVLQLIPALEKEGAARSLNHYRKVLAQRMDKEKGALFSFREKDLIPEETIGPWIDNEIEQSPSPQQENMKNRARLLREQHRAAIEASGGDIDSLLADIDEPTLPKLEDLPEFIADMERQAQEMENDAQQRKREMEAHYPQLNNDENQPRGPESMHRMQEMLHQHQHELSEKKRAQTREALHQMYLAAVQHQPPAVRLKGDLAMILRQRAERTMAQGGNFSGMDLTGVDFSGMDFRGANFEKALLECADLSHCQLDNASFQGAVLARTELQHSSLRNCDFSGASLVLAECHQSDFTGARFEDSQLQNALFAQCIFDNATLKTLILREISLIDCRFHRAELDGCVFMELTLAQPDFSHARLHKCSFLQSELEHAIFHQATLESCSLVQTIAERADFSAATWLASAAVSESSLIGADFSHATLQQSNLRQTPLQGARFALAKIENSDLSEAYCRDASFIRANLVGSLFVRTDFREADFTDANLMGALLQKSQLAGANFEGANLFRADLSQSFTSKTTRLDGAWTKRIKTLPKRDGEVI

SEQ ID NO: 6397 - DNA, 3612 bp, Klebsiella aerogenes
  misc_feature (875)..(875): n is a, c, g or t
atgctgacacttctgctttccatactgaccaaccggctgctgtggggttttctcggcgctacggcggtggcggccgtcatctggatgattggcccgctattgtcgattgtcgataccaggccgctagaatcggaacaaaaccgcgttatatctattgcgctggtgtacctcatctgggcgcaaagccacattctgccgcgtctgtacaacgcctggctcaaccgcaagctgatggataacctgaaggaagacacgccgaagggcaacgatccgcagcagcgcctcaatagcgaagaccagatcctcgccgatcgctttgatgaagccgcgcaaatgttgaaaaaagcgcacttcagcaaaaccggtaatggtcagtggacccagcgctttagcacccactatctgtatcagctgccgtggtatgtgattattggcgcatccggctccggtaaaaccacagccttagccaactccgggctgcagtttccgctagccgaccgcttcggtaaaacggcgttacgcggcatcggcggcacgcgcaactgtgactggtggtttaccaacgaagccgtgctgctggacaccgccgggcgctataccacccaggagagcgagcaggcgcaggacgccagcgagtggctgaagtttatggggttattgcgtaaataccgccgccgccagccgattaacggcgttatcgtcacggtaagtatctccgatctgttaacgcaatcgacggaggcctcgcggcagcaggcggttaatctgcgccagcgtctctctgaactacatgaacaattgggtattcgtttcccggtatacgtactggtgacgaaggccgatctgcttaaaggcttccgcgcctggtttgccgnttacgacaaggcgcagcgcgatcaaatctggggcttcactttcccgtgggaacaggcaagccttgccgacttcgatctgatgggccgttttacccaggagtttgcgttactgcaacaacggctagaagccgggctaccggatacgatgctgcaagagcatgatgccaaaacccgcgccgaagcctggctgttcccgcaagagtttgcggcgttgcgaccgctgttagcggactatcttagtaccgtttttgcccgctctaactttgaaaccgagttttcaccgcgcggcatttatttcgccagcggcacccaggaagggctaccgttcgaccgcgtgatgggcgaactcaatcgcgcgctgtctttgccgcagggaaatgaaaacgacaactgggactcggtcagtaaagaagcgccgatccccggcgccaagggccagagttatttcattaaaaacctgctgcaaaacgtgattttccaggaagccggcatcgccgggcagaaccgctggtgggaactgcgtaaccgcgcggcgatctggtcaggctatgcggcgctcgcggcgctgttaatcatttcatgcgtactgtggctgaccagctacggcaaaaacaaggcctacctgcaagaagtctcggcgaaggtgccgcaggttgagcagcagagcaaagcgctgcaaaaccccgagcagcgcgatctgttcgccatgctgccgctactcaacggcctgctggaattgccgaagagcgccgattttgacgtcaacgacccgccggtcagccgccggatggggctctaccgcggtaatgatgtcagcgacgcctcgcagacgctgtatcaaaaagcgctgcagcaaatgctgctaccggatgtcgccatgcgaatcactacctggttgcgcaacgacaacggcagtgacgccgaatatagctacgaggcgttgaaagcctatcaaatgctctatcagcccaagcagtatgacggcaagtttttactctcctgggtgatgcttaacctgcagcgtaacctgccgcaaaacgtgacgcaggcgcagctacgacagctggaagggcatctggtccagctactggaaccgcaaatccagtcctcgccgtatgccaaagacgatgcgctgatcgcccgcgaacgggcgttgattaaccagcaaccgctctcctcaagagtgtatggtcggctgaaacgtctgcttgagcatgacgacaatctgaaagcggtctcgctggcgacgctcggcgggccgcagagcgaactggtgttctcgcgtaaaagcggtacaccgatcgcagaaggcgtgccagggctgtacacgccagatggctactggcaggtgttcaataaacagatcgataacgtgaccagcgcgctgcatgaagatgatatttgggtgctgggcgccgccagcgcgtcggaagataagcagcaaaccgataacgccgtccgccagctctatatgcgtgattttatcgccaactgggatcgcttcctcgccgatattcagctcaacaatagcgccgatctgtcatcgcggatcaacaccgcgcgcctgctttcagccagtaactcgccgctgcgccggctggttatcagcctgagccaggtgctgaacctggcgcgcgctgagccggatacggttaaaagcgaaagttcagccgagcagggcaaccgtgcgacccgaacgctggaagcgctttttcgccatgatgagggcggcgcaacccagggcgcggcgcttagccagacgccggaacagctggtaaccgaacactacgcgccgctgatcgagctggcgcagccgttggaaaagggcggcaaaacgattgtgtttgacgacttcctcaaacagatcgacgaactttatcgctacttgaccgcggtacaggatgccgccaacagcggtatgcaaccgccgggcggcgatgcgattagccgtctgcaggccagcgccgggcgtttaccgggcggcctgcaaaccatgttcagcaaaatggcggtcggcgccagcagtgatacccagcgccgcgatctcgataacgtacgtaaacggattaacgtggaagtcggcggattctgccgccaggctatcgccgggcgctatccgctggttcgcagcgccagaagcgaagtcacgccggacgatctggcgcgtatgttcgcgccgggtaccggcatgatggataccttcttccgtgataacctgaccaataaagtcgataccacgcaatcaagctggcgttttatgcccggcatcgatggcaaaacgttgccgggtagtgaagggttattaaggcctttccagcaggcgcaatcgatccgcgacgcgttctttgccaatggcgcgaccacgccgtcatttaaagtgacggtgcgcaccatcagcatggacaacaggatccttaacctgacgctggatgttgatggccagcagttgcgctacagccacggtccgcaggcggtgcaaatgatgagctggccagggccgggcggcaccaatcaggtgcgtatgcaactcggtctggccgatggtaccacctcgacgctggtgaccagcggctcatgggcgctgaaccgcttttttgataaagcgcgcaccgcgcccggcagcagcagtttgagccgtcaggcaacgtttaacgtcgatggttatcaggtcacgctggagtttgcgccgaacagtattcgcaatccgttccagcttccccgtttctcatgtccataa

SEQ ID NO: 6398 - protein, 1203 aa, Klebsiella aerogenes
  misc_feature (292)..(292): Xaa can be any naturally occurring amino acid
MLTLLLSILTNRLLWGFLGATAVAAVIWMIGPLLSIVDTRPLESEQNRVISIALVYLIWAQSHILPRLYNAWLNRKLMDNLKEDTPKGNDPQQRLNSEDQILADRFDEAAQMLKKAHFSKTGNGQWTQRFSTHYLYQLPWYVIIGASGSGKTTALANSGLQFPLADRFGKTALRGIGGTRNCDWWFTNEAVLLDTAGRYTTQESEQAQDASEWLKFMGLLRKYRRRQPINGVIVTVSISDLLTQSTEASRQQAVNLRQRLSELHEQLGIRFPVYVLVTKADLLKGFRAWFAXYDKAQRDQIWGFTFPWEQASLADFDLMGRFTQEFALLQQRLEAGLPDTMLQEHDAKTRAEAWLFPQEFAALRPLLADYLSTVFARSNFETEFSPRGIYFASGTQEGLPFDRVMGELNRALSLPQGNENDNWDSVSKEAPIPGAKGQSYFIKNLLQNVIFQEAGIAGQNRWWELRNRAAIWSGYAALAALLIISCVLWLTSYGKNKAYLQEVSAKVPQVEQQSKALQNPEQRDLFAMLPLLNGLLELPKSADFDVNDPPVSRRMGLYRGNDVSDASQTLYQKALQQMLLPDVAMRITTWLRNDNGSDAEYSYEALKAYQMLYQPKQYDGKFLLSWVMLNLQRNLPQNVTQAQLRQLEGHLVQLLEPQIQSSPYAKDDALIARERALINQQPLSSRVYGRLKRLLEHDDNLKAVSLATLGGPQSELVFSRKSGTPIAEGVPGLYTPDGYWQVFNKQIDNVTSALHEDDIWVLGAASASEDKQQTDNAVRQLYMRDFIANWDRFLADIQLNNSADLSSRINTARLLSASNSPLRRLVISLSQVLNLARAEPDTVKSESSAEQGNRATRTLEALFRHDEGGATQGAALSQTPEQLVTEHYAPLIELAQPLEKGGKTIVFDDFLKQIDELYRYLTAVQDAANSGMQPPGGDAISRLQASAGRLPGGLQTMFSKMAVGASSDTQRRDLDNVRKRINVEVGGFCRQAIAGRYPLVRSARSEVTPDDLARMFAPGTGMMDTFFRDNLTNKVDTTQSSWRFMPGIDGKTLPGSEGLLRPFQQAQSIRDAFFANGATTPSFKVTVRTISMDNRILNLTLDVDGQQLRYSHGPQAVQMMSWPGPGGTNQVRMQLGLADGTTSTLVTSGSWALNRFFDKARTAPGSSSLSRQATFNVDGYQVTLEFAPNSIRNPFQLPRFSCP

SEQ ID NO: 6399 - DNA, 723 bp, Enterobacter cloacae
  misc_feature (52)..(52): n is a, c, g or t
atggcgccaggtattcacattcgcgatttatgtctgcgctttggcacccggnccctctttcgcgatctctcctttgatattgccgccgggcaatgggtatcgctgctgggggccagcggcgcgggcaaaaccagcctgttgcgtattatcgccgggctggcggcgccaacccgcggaaccgtcgtcgccagcgatggccttcctgttactacgcgattggcgtggatggggcaaaaagatctgctctatccgtggcttaacgtgcgggaaaatgtcgccctcggcgccaggctgcgcggtgaaaaggccgataacgcgcgggtaaacgagcttcttgagctggtcgggctcgcctcctgcgctgatgaacgcccggccgcgctgtccggtgggatgcgccagcgcgcggcgttggcacgcaccctctatgaggatcgtcccattgtgctgatggatgaaccgttttccgccctcgatacgcttacccgaacgcggatacagacccttgccgcgcgcttgctcaccgggcgtaccgtagtgctcattacccacgacccgatggaagcctgccgcctcagccatcggctgctggtgctttcgccgacgggcaggattgatgatagtcatcatttaagcggaatcccgcctcgcgccccggatgatcccgcgctgctggcaagccaggcgcagctgctgcagcaattgatgagggcgaacggatga

SEQ ID NO: 6400 - protein, 240 aa, Enterobacter cloacae
  misc_feature (18)..(18): Xaa can be any naturally occurring amino acid
MAPGIHIRDLCLRFGTRXLFRDLSFDIAAGQWVSLLGASGAGKTSLLRIIAGLAAPTRGTVVASDGLPVTTRLAWMGQKDLLYPWLNVRENVALGARLRGEKADNARVNELLELVGLASCADERPAALSGGMRQRAALARTLYEDRPIVLMDEPFSALDTLTRTRIQTLAARLLTGRTVVLITHDPMEACRLSHRLLVLSPTGRIDDSHHLSGIPPRAPDDPALLASQAQLLQQLMRANG

SEQ ID NO: 6401 - DNA, 1191 bp, Klebsiella aerogenes
  misc_feature (633)..(633): n is a, c, g or t
atggctgttgtgattgcatttttggccggtatgttgacgctgctcagcccctgtaccttaccggtgatcccgctggtgtttgccagcgtaagcgggcgtaaggggcaactcatcctattgttgttcggtatggggttgatgtttaccgctgtatcgctgctggccacgacggcagggggatggttagtcaatctgactatcgtcgggcgttggctggcgctgggctttttggtcgttgtggctatcagtttgctgtcaacacgcgttgcaggctggctcggatcgccagcggttgcgttgggtaatcaacttaaccaacagagctatcgttatggcagtgggctcgcttcagtattcgccggactggcgattggactactttgggcgccgtgcgcgggaccggtgctgggggcgatttttagcctggcgttgttgcaaggaaattcagtgactaccggcatcttgctgctttcctatgccagcggatgcgcgttgatgttgctgctattggggtggttcggcgcgcggctgatttcccgtttgcgcggtggtcaggtgataagtgggcggttacgccaactggctggcgtggcaatgttggccgcagtggcattaatcgccagcggtagcgancgttatctgcagggcgccagcggtttaacccatcgtctggagcagcggctcagcgcgtttatgccccaggatcaacaacgagttcgtctggagccgatcgttgcgccgcggccaaccagcgctatgccggaattgcaaggcggtaccgcatggattaatagcccaccccttaccaatgcggcgttaaagggtaaggtggtgctgattgatttttggacccgcgattgcatcaactgtcagcatacgctgccttatgtacggacgtgggccaataagtatcgcgatgcggggctggtggtgattggcgtacatacgccggaatatccgtgtgaacggtcgttgccgcagcttcgtgaagcggtcagccagcggcagctaaactatccggttgtcgcagataacaactacgccatctggaatgcgtttggtaatcagtactggccggcgcattatttcttcgacgcgcgggggcaactgcgttataccgcctttggcgaaggcgattatgcccgtcaggagcaggtgatccaacaactgctgcgcgaagcgcggacgtga

SEQ ID NO: 6402 - protein, 396 aa, Klebsiella aerogenes
  misc_feature (211)..(211): Xaa can be any naturally occurring amino acid
MAVVIAFLAGMLTLLSPCTLPVIPLVFASVSGRKGQLILLLFGMGLMFTAVSLLATTAGGWLVNLTIVGRWLALGFLVVVAISLLSTRVAGWLGSPAVALGNQLNQQSYRYGSGLASVFAGLAIGLLWAPCAGPVLGAIFSLALLQGNSVTTGILLLSYASGCALMLLLLGWFGARLISRLRGGQVISGRLRQLAGVAMLAAVALIASGSXRYLQGASGLTHRLEQRLSAFMPQDQQRVRLEPIVAPRPTSAMPELQGGTAWINSPPLTNAALKGKVVLIDFWTRDCINCQHTLPYVRTWANKYRDAGLVVIGVHTPEYPCERSLPQLREAVSQRQLNYPVVADNNYAIWNAFGNQYWPAHYFFDARGQLRYTAFGEGDYARQEQVIQQLLREART

SEQ ID NO: 6403 - DNA, 930 bp, Citrobacter koseri
  misc_feature (205)..(205): n is a, c, g or t
atgacgatggcgcttgtgcaaccgacgaccgggcgagtgtcaggactgttctggcgaaaaccctcattgggcctgtttttactgctgctggggccgttgatgtggtttggcatcgtctatctgggatcgctcctgacgctgttatggcaaagcttctatacctttgatgactttacgatgtcggtgaccacggatttgacgctcnctaacctgaaggcgctgttcaatcccgccaactacgacatcattatccgtaccctggtgatggccatctgcgtgactatggccagtgcaatcctggcattgccgatggcctggtatatggcgcgttatacccgcggcaagatgaaagctttcttttatatcgcggtaatgttgccgatgtgggcaagttatatcgtcaaggcctacgcctggacgctattgctggcgaaagatggcgtggcgcaatggttcctcggcaaccttggtctggagagcgtgttaaatatggtattgaccatcccggcggtcggcggcaataccttgtcgacctccgggcttgggcgattcatggtatttgtctatatctggctgccgttcatgatcctgccggtgcaggcggcgctggaacgtctgccgccatcgctgttgcaggcctcagccgatttaggcgcccgaccgcaacaaaccttccgctacgtggtactgcctttagccataccgggtatcgcggcaggttctatctttaccttttccctcacgcttggggattttattgtcccgcaactggtggggccgcccggtttctttatcggcaacatggtctattcgcagcagggcgcgattggcaatatgccgatggcggcggcgttcacgttggtgccgattgttcttattgcactctatctggcgtttgttaagcgcctgggagcgtttgatgcactctga

SEQ ID NO: 6404 - protein, 309 aa, Citrobacter koseri
  misc_feature (69)..(69): Xaa can be any naturally occurring amino acid
MTMALVQPTTGRVSGLFWRKPSLGLFLLLLGPLMWFGIVYLGSLLTLLWQSFYTFDDFTMSVTTDLTLXNLKALFNPANYDIIIRTLVMAICVTMASAILALPMAWYMARYTRGKMKAFFYIAVMLPMWASYIVKAYAWTLLLAKDGVAQWFLGNLGLESVLNMVLTIPAVGGNTLSTSGLGRFMVFVYIWLPFMILPVQAALERLPPSLLQASADLGARPQQTFRYVVLPLAIPGIAAGSIFTFSLTLGDFIVPQLVGPPGFFIGNMVYSQQGAIGNMPMAAAFTLVPIVLIALYLAFVKRLGAFDAL

SEQ ID NO: 6405 - DNA, 999 bp, Klebsiella aerogenes
  misc_feature (103)..(103): n is a, c, g or t
atgaataaacacgtaacgggcggccaggtgctgaatctaccggctggctattttggtatggtgctggggataataggcatgggcttcgcctggcgttatgccngtaccatctggccggtgagcagtattattggcgatgcgctggtggtgctggcgacaactatctgggcgctattaatgatagcgtttattgcgcgggctattcgtttcccgtggagcgtgcggcaggagatccgtcatccggtggccagcagttttgtcagcctgatcccggcgacaacgctattggtgtcgatcgcttttgcaggctggtatcgcccgttgtcgctggcgttatttgctgcgggggttacgctgcagctttgctatgcggcctggcagagcgccgggttgtggcggggtaaacatccgggagaggcgacgacgcccggtttatatctgccgaccgtcgccaacaattttatcagcgccatggcctgcggcgcgctgggatttaatgatgccggactggcgtttctcggcgctggcgtcttttcctggctcagcctggagccggttatcctgcagcggctgcgcagcaacggcgagctaccggcggcgttgcggacgtcgctgggcatccagctggcgccggcgctggtggcctgtagcgcgtggctcagcgtcaatggcgacgacggtgatacgtttgccaaaatgctatttggttatgggctgttgcagttgctatttatgctgcgcctgatgccgtggtatctgcagcagccgtttaatgcgtcattctggagcttctcgttcgggatttccgcactggcgaccaccggcctgcatctgggtcacggccagccgcacggatttttccatactctggcgatccccttatttatttttagtaacctgattatcggcctgctactgctgcgtacccttcttctgctggtgcggggtaaactgttaattcgcgtagaccgtgccactttattgccaaacaaggattaa

SEQ ID NO: 6406 - protein, 332 aa, Klebsiella aerogenes
  misc_feature (35)..(35): Xaa can be any naturally occurring amino acid
MNKHVTGGQVLNLPAGYFGMVLGIIGMGFAWRYAXTIWPVSSIIGDALVVLATTIWALLMIAFIARAIRFPWSVRQEIRHPVASSFVSLIPATTLLVSIAFAGWYRPLSLALFAAGVTLQLCYAAWQSAGLWRGKHPGEATTPGLYLPTVANNFISAMACGALGFNDAGLAFLGAGVFSWLSLEPVILQRLRSNGELPAALRTSLGIQLAPALVACSAWLSVNGDDGDTFAKMLFGYGLLQLLFMLRLMPWYLQQPFNASFWSFSFGISALATTGLHLGHGQPHGFFHTLAIPLFIFSNLIIGLLLLRTLLLLVRGKLLIRVDRATLLPNKD

SEQ ID NO: 6407 - DNA, 882 bp, Enterobacter cloacae
  misc_feature (538)..(538): n is a, c, g or t
atgaaagcagattttaactgggacgatacgcggatttttctggctgtggcccgctcaggtacgctaagcggcgcggcagaaactatggatatgggcatcgcaaccctgtcacgaagactcgaccggctggaaaaatcattggccgtcccccttttcagccggcatcaaagcggctaccggctaacggatgatggcgaggcgctgctggcgcgagcagaggcgcttgagcatgcagggctcgcttttggcgagacggcgaggctgcaggggaacgtggccggactggtccggctggctacctcggacaacctggcggcgcattttattctgccttcactcaacggcttgatggaaaaatatcccgacctgcgggtcgaggtgctcagcggcgtgcaatccgtcaacctgcatcgacgggatgccgatttagccattcgaatggtcaaaccggaaagcggcaacctgacgctgaagcgtctcgggaaggtggggtttggtctgtacagcgccgataccggacaagcaggctctaccgacntcgcgttcaatcacgctcactacataggctggccagaatcacaccagcatctgcccgccgcgcgctggataactcggacgcttcgcggcaggccgtgccgggtggaagccaacacgctgctggcgcagctgtcggcggtttcagctggcctgggattaggcgtgttgccacactttatggcgcggaaaaatggcctgcagtgcgtgaatgcggatatcggcgtcgaccaaaccctatggctggtgatgcattccgatttagcccattcgcggcgcgtcagagtggtggccgatcatttaattgccctgtttgatgagattaaagatcagctgacatcgccataa

SEQ ID NO: 6408 - protein, 293 aa, Enterobacter cloacae
  misc_feature (180)..(180): Xaa can be any naturally occurring amino acid
MKADFNWDDTRIFLAVARSGTLSGAAETMDMGIATLSRRLDRLEKSLAVPLFSRHQSGYRLTDDGEALLARAEALEHAGLAFGETARLQGNVAGLVRLATSDNLAAHFILPSLNGLMEKYPDLRVEVLSGVQSVNLHRRDADLAIRMVKPESGNLTLKRLGKVGFGLYSADTGQAGSTDXAFNHAHYIGWPESHQHLPAARWITRTLRGRPCRVEANTLLAQLSAVSAGLGLGVLPHFMARKNGLQCVNADIGVDQTLWLVMHSDLAHSRRVRVVADHLIALFDEIKDQLTSP

SEQ ID NO: 6409 - DNA, 1119 bp, Enterobacter cloacae
  misc_feature (971)..(971): n is a, c, g or t
atgcaatacgacctcatcattatcggtagcggctccgttggcgctgccgctggctattacgcccgccgcgccggtctgaatgtcctgatgaccgatgcccacaaaccgccgcatcaggaaggcagccaccatggcaacacgcgtctgattcgtcacgcttatggcgagggcgaaaaatacgtaccgttggtgctacgtgcccagcagctatgggacgaattcgcgcaagacagcggcgaggccgtattcgaaaaaaccggcgtcattaacctgggcccggccagctccgattttctcaataacgtggcccacagcgcgcgtcagtttaagcttaacgtagaggaactggacgctgaagctgtcatgaagcgttggccggagattcgtatcccacaagattatcgggcaatttttgaaccggcttccggcgtgttacgcagcgaactggcggttgaaacctggatccggctggcgcgtgaggcgggttgtgcccagctcttcaactgtccggtgaccgcgatccatcatcatgccgatggcgtgaccatcgataccgctgacggcagttacaatggcaaaaaactgctgatcagcgccggaacctgggtaacgaaattattgccggaactgcccattcaaccggtacgtaaagtcttcgcctggttccaggccgatggtcgctatagcacgaaaaataacttccctgctttcaccggcgaactaccgaatggcgatcagtattatggcttcccggcggaagacaacgaattaaagatcggcaaacacaatggcggccagctgatttccgaaccgggcgagcggaaaccgtttggcgctgtcgccagcgatgggtctgagtcgttcaacttcctgcgcaacgtgctgcccggaattggcggctgcctgcacggcgcctcctgtacgtacgataatacggtagatgaagatttcattattgatacccttcccgntcatgacagcacattactcattaccggattaagcggtcacggtttcaagtttgctccagtacttggcgaaattgcgacgcaatttgcgcaaggtgaaacgacggagtttgatttgactcccttctcgctggcgcgattttcacaataa

SEQ ID NO: 6410 - protein, 372 aa, Enterobacter cloacae
  misc_feature (324)..(324): Xaa can be any naturally occurring amino acid
MQYDLIIIGSGSVGAAAGYYARRAGLNVLMTDAHKPPHQEGSHHGNTRLIRHAYGEGEKYVPLVLRAQQLWDEFAQDSGEAVFEKTGVINLGPASSDFLNNVAHSARQFKLNVEELDAEAVMKRWPEIRIPQDYRAIFEPASGVLRSELAVETWIRLAREAGCAQLFNCPVTAIHHHADGVTIDTADGSYNGKKLLISAGTWVTKLLPELPIQPVRKVFAWFQADGRYSTKNNFPAFTGELPNGDQYYGFPAEDNELKIGKHNGGQLISEPGERKPFGAVASDGSESFNFLRNVLPGIGGCLHGASCTYDNTVDEDFIIDTLPXHDSTLLITGLSGHGFKFAPVLGEIATQFAQGETTEFDLTPFSLARFSQ

SEQ ID NO: 6411 - DNA, 1476 bp, Klebsiella aerogenes
  misc_feature (800)..(800): n is a, c, g or t
atgagtttatggattaacggcgaatggcaaagcgggcgtggcccgcagcgcagtaaatataacccggtcaaccaggcgctgctgtggcagggaaatgacgccgacgccgggcaggtcgcgcaggcggttagcgccgcgcgtcaggcttttcccgcctgggcccgcctgccatttagcgcgcgtcaggggatcgtcgagaagtttgcggcgctgctggaagcgaacaaaagccagctgacggcgattattgccgctgagaccggtaaaccacactgggaggcggccacggaaattaccgccatgataaataaggtggcgatctcggtgcgcgcttaccatagccgcaccggcgagagcgagacggcgatggccgacggcgccgccacgttgcgccaccgtccccacggggtgctggcggtgttcgggccgtataacttcccgggccatttacctaacggacacatcgtaccggcgctactcgccggtaataccatcgtctttaaacccagcgagcttacgccgcaaagtggcgaagcggtggttaaactgtgggctgaggcgggcttacccgctggagtcgtgaatctactgcagggcggccgggagacaggcgaggcgctgagcgggcaggcggatatcgacggtctgttgttcaccggcagttccgcgaccggcttccaactgcatcgtcagctggccgggcagccgcaaaaaatcctcgcccttgaaatgggcggcaataacccgttgattgttgacgagccgcaggatattgacgcagcggttcacctgactatccngtcggcatttatcaccgccgggcagcgttgtacctgcgcgcgccgcctgttggtcaagcgcggcacggcgggtgacgcgtttttgcagcgtttagtgacggtgtcacaacgtcttattcccggcgagtgggatgcgcagccgcagccgttcctgggcgggctggtatcgccgcaggccgcgcaaaaggtgcatcaggcctggcttgggcacgtggcgagcggcggacagacgttactggagccgcgtctgttgcgcgacggcacttcgctgctgacgccggggatcatcgacatgagcaacgtgcagcaggtggcggatgaagaagtctttggcccgctgttgtgcgtgtggcgctatgacgatttcgcgcaagcgatcgcgatggctaacgccacccgttttggtctctcctgcggattgatttccgccgagcgcgataagttcgagcgcctgttgctggaggcccgcgccgggatagtcaactggaacaagccgctgactggcgccgccagtaccgcgccgtttggcggaaccggcgcctcgggaaatcatcgtccaggcgcctggtacgccgccgattattgcgcctggccgatggccagcctggaatctgccgaactggcgctaccggagacgctcagtccgggtctggatttttcatcgcaggcaagttga

SEQ ID NO: 6412 - protein, 491 aa, Klebsiella aerogenes
  misc_feature (267)..(267): Xaa can be any naturally occurring amino acid
MSLWINGEWQSGRGPQRSKYNPVNQALLWQGNDADAGQVAQAVSAARQAFPAWARLPFSARQGIVEKFAALLEANKSQLTAIIAAETGKPHWEAATEITAMINKVAISVRAYHSRTGESETAMADGAATLRHRPHGVLAVFGPYNFPGHLPNGHIVPALLAGNTIVFKPSELTPQSGEAVVKLWAEAGLPAGVVNLLQGGRETGEALSGQADIDGLLFTGSSATGFQLHRQLAGQPQKILALEMGGNNPLIVDEPQDIDAAVHLTIXSAFITAGQRCTCARRLLVKRGTAGDAFLQRLVTVSQRLIPGEWDAQPQPFLGGLVSPQAAQKVHQAWLGHVASGGQTLLEPRLLRDGTSLLTPGIIDMSNVQQVADEEVFGPLLCVWRYDDFAQAIAMANATRFGLSCGLISAERDKFERLLLEARAGIVNWNKPLTGAASTAPFGGTGASGNHRPGAWYAADYCAWPMASLESAELALPETLSPGLDFSSQAS

SEQ ID NO: 6413 - DNA, 2064 bp, Enterobacter cloacae
  misc_feature (2044)..(2044): n is a, c, g or t
atgcggttgtttattgcagaaaaaccgagtctcggtcgcgctatcgccgatgtgttgccgaaaccgcatcgcaaaggcgatggctttattgagtgcggcaacgggcaggtggtcacttggtgtatcggtcacctgctggagcaggcgcagccggatgtttacgacggacgctacgcgcgctggaacctgctcgatctacctatcgttccggaaaagtggcaactgcaaccaaaaccgtcggtcaccaaacagctgaacgtcatcaagcgcctgcttggcgaggcgcaggaagtggttcacgcgggcgacccggatagagaagggcaactgctggtcgatgaggtgctggactacctgcagctggcgccggaaaagcgccagcaggtgcagcgttgcctgattaacgacctcaacccacaggcggttgagcgggcgattaaccgcctgcgcgcgaatagcgagtttgtcccgctgtgtgtgtcggcgctggcccgcgctcgcgccgactggctgtatggtatcaacatgacccgcgcctacaccattctcgggcgtaatgccggctatcagggagtgttgtcggttggtcgcgtacagacgccggtgttggggctggtggtgcgtcgcgatgaagagatcgagaacttcgtcgccaaagatttctttgacgtcaaagcgcatattgtcacgccgcaagacgagcggtttatcgccacctgggtgccgagcgaagcctgcgaaccctatcaggatgaagaggggcgtttactgcatcgcccgctggccgagcatgtggttaaacgcattgaaggccagccggcaatcgtgaccggctataacgataagcgcgattccgaaccggcgccgctaccgttttcactgtcggcgttacagatcgaagcggccaaacgtttcggcttcagcgcccagaacgtgctggatatctgccagaagctgtatgagacccacaaactgattacctatccgcgctcggatagccgctacctgccggaggaacattttgccggccgccatgcggtactgaatgcgattagcgtccatgcgccggatctgctgccgcagccggtgatggatccggagatccgcaaccgttgttgggatgataaaaaggtcgatgcgcaccatgccattatcccgaccgcgcgcagcagtcaggtcaaactcaacgataacgaagagaaggtatacaacctgatcgctcgtcagtatctgatgcagttctgcccggatgcggtgttccgcaagtgccagattgacctggatattgctaacggcaaatttgtcgccaaggcgcgcttcctcgccgaagcgggctggcgcgcgctgcttggtaacaaagagcgcgacgaagagaacgacggtacgccgctgccggtggtcgccaaaggcgatgagctattgtgcgaaaaaggtgaagtggtggagcgacaaacccagccgccgcgccactttaccgacgcgacgttactgtcggcgatgaccggtattgcccgcttcgtgcaggataaagaactgaaaaagatcctccgcgcaaccgacggtctggggacggaagcgacccgcgccgggattattgagctgctgtttaagcgcggtttcctgaataaaaaggggcgctatatccactcatcggatgccggtcgggcgctaatccattctctgccggaaatggccgcgcgcccggatatgaccgcccactgggaatcggtattgacgcaaatcagcgaaaaacagtgccgctatcaggactttatgcagccgctggtggggacgctgttccagcttatcgatcaggcgcggagcacgccggtgcgccagttccgcgggctggtcgcgccaggcggagcgaaaaagtcgtttagtaaagggaaaggcaagccgaaagggaaaaagccggaggcggacatcgcgccggaaagtccgcaattattttcttcgcccctcgccacgaggggcttagctaaaacgcacttccgcctgagggcgcttaacccggatgagggttttcccacatatcatttcngcctccctgctctaaaatag

SEQ ID NO: 6414 - protein, 687 aa, Enterobacter cloacae
  misc_feature (682)..(682): Xaa can be any naturally occurring amino acid
MRLFIAEKPSLGRAIADVLPKPHRKGDGFIECGNGQVVTWCIGHLLEQAQPDVYDGRYARWNLLDLPIVPEKWQLQPKPSVTKQLNVIKRLLGEAQEVVHAGDPDREGQLLVDEVLDYLQLAPEKRQQVQRCLINDLNPQAVERAINRLRANSEFVPLCVSALARARADWLYGINMTRAYTILGRNAGYQGVLSVGRVQTPVLGLVVRRDEEIENFVAKDFFDVKAHIVTPQDERFIATWVPSEACEPYQDEEGRLLHRPLAEHVVKRIEGQPAIVTGYNDKRDSEPAPLPFSLSALQIEAAKRFGFSAQNVLDICQKLYETHKLITYPRSDSRYLPEEHFAGRHAVLNAISVHAPDLLPQPVMDPEIRNRCWDDKKVDAHHAIIPTARSSQVKLNDNEEKVYNLIARQYLMQFCPDAVFRKCQIDLDIANGKFVAKARFLAEAGWRALLGNKERDEENDGTPLPVVAKGDELLCEKGEVVERQTQPPRHFTDATLLSAMTGIARFVQDKELKKILRATDGLGTEATRAGIIELLFKRGFLNKKGRYIHSSDAGRALIHSLPEMAARPDMTAHWESVLTQISEKQCRYQDFMQPLVGTLFQLIDQARSTPVRQFRGLVAPGGAKKSFSKGKGKPKGKKPEADIAPESPQLFSSPLATRGLAKTHFRLRALNPDEGFPTYHFXLPALK

SEQ ID NO: 6415 - DNA, 2217 bp, Klebsiella aerogenes
  misc_feature (95)..(95): n is a, c, g or t
atggttaatcggatatcgatcctgtcatctgtcgacagctcctcgttattattctggaaattcagcgggcaggagaaactgtccgaacctttccnctttcaggtcgatttactcagccaggattttgctatcgaccgtcaggccatgctcggcaaaaacatgacggtggcggttcccggccaatggggacaggagcgttatctttccggcaaaatcaccgccgttaccgtacgcgccgaagatcttggcgagacgcgctacgccgtctatcagaccacgctggaacccgatttctggccgatgatgcgcgaccgcaacttccgtattttccagcagcagcgggtgccggatatcgtggccaaactgtttagcgagcataacgttaagtttgaggacaaacttacgcgtagctaccggcagtgggattattgtgtacagtacgcggaaagcagcttccatttcatcagccgtttgctggagctggaaggtattagctatctgttccgccacgataaagacggccataccctggtgctgatggatgactatcagcagactgaatccttccccggttatgaaactattccctggcatgcgcaaccgggcggcggcgcggtcggcgaagagggcatcagccagctgatggcgagccacgtcgtcacgccggggctttacagcaccgatgactatgattttcgcaagccccacgcctggatgctgcaaacgctgcagaatccggtctcgccgacaccgggcaaaatcgacgtttacgactggccggggcgctttatggagcacggcgacggcgaagcctacgcccgtattcgtcagcagtcctggcaggccgaacagcagcaaacgcagggtatcgccaccgcgaccggtatcgtcccgggacacacgtttaccctgacgcatgcgcctaacatggctgataacgctaaatggctggtggtgggcgcccgctatgattttgaagagaatcagtatgcctccggtggcggaaataccgcgcagcaccgcatcgcattcaccgttattcccgccgcgacgccatttgtccctgcgtcaaggaccgactggccgcgcacctacgggccgcaaaccgcccgcgtggtagggccgaaaggagaatcgatctggaccgataaatatggccggattaaggtgaaattccactgggaccgcgaaagccagggcgatgaaaatagctcctgttgggtgcgcgtttccagcgcctgggccggccagggttacggcggggtgcagatcccacgcgtcggtgatgaagtggtggtggactttattaacggtgagccggaccggccgattgtcattggccgcgtctataacgaagccagtatgccgccgtgggcgctaccggcggcagccacgcagatgggttttatgagccgttcaaaggatggttcgccggacaacgccaacgccctgcgttttgaagataaacccggcgaagagcagctctggctgcacgccgagcgcaacatggatactgaagtcgaaaacgacgagacccatgatgtcggcaataaccgcaccaaaaccgtcggcaaagacgaaaccagccatatcaaacagaaccgcacccgcacggtggatggcaatgaaagcgttaccgtcggcaaagatcgcagcaaaaccatcaatggtaatgaaaccaccaccgttgagcagaaccgtaccgaaagcgtgaaggggaatgagaccctaagcgttgagcagaaccgcgatgaaaccatcagcggcaaccataccaccacggtgaaaagcgaccataccgcgaccgtcgaaggcaagcagtcactgacggtcgtacaggatcgcacccgtcaggtgcagggtaacgaaagcgtcagcgtccagcagaaccgtaacgtgcaggtcaccggcaaccagacgctaggagtgaccggcaatcacgatatttccgtgaccggtaagcaaacgcagaccatcaccagtaagcaagaggtgacgatcggcgccgggcgtaccctgagcatcaccggcggtgatacccgctttacgcaagggagcgtaaccgacagcgctaccgataccgtacatatcaacgtgggcgaaagcggcattctgataagcaacggcagcgtggagattaccgctggcgggtcgacgatcaccattaacgccgccggcgtgatggtgaatggtaagaagattgagctcaatgcctga

SEQ ID NO: 6416 - protein, 738 aa, Klebsiella aerogenes
  misc_feature (32)..(32): Xaa can be any naturally occurring amino acid
MVNRISILSSVDSSSLLFWKFSGQEKLSEPFXFQVDLLSQDFAIDRQAMLGKNMTVAVPGQWGQERYLSGKITAVTVRAEDLGETRYAVYQTTLEPDFWPMMRDRNFRIFQQQRVPDIVAKLFSEHNVKFEDKLTRSYRQWDYCVQYAESSFHFISRLLELEGISYLFRHDKDGHTLVLMDDYQQTESFPGYETIPWHAQPGGGAVGEEGISQLMASHVVTPGLYSTDDYDFRKPHAWMLQTLQNPVSPTPGKIDVYDWPGRFMEHGDGEAYARIRQQSWQAEQQQTQGIATATGIVPGHTFTLTHAPNMADNAKWLVVGARYDFEENQYASGGGNTAQHRIAFTVIPAATPFVPASRTDWPRTYGPQTARVVGPKGESIWTDKYGRIKVKFHWDRESQGDENSSCWVRVSSAWAGQGYGGVQIPRVGDEVVVDFINGEPDRPIVIGRVYNEASMPPWALPAAATQMGFMSRSKDGSPDNANALRFEDKPGEEQLWLHAERNMDTEVENDETHDVGNNRTKTVGKDETSHIKQNRTRTVDGNESVTVGKDRSKTINGNETTTVEQNRTESVKGNETLSVEQNRDETISGNHTTTVKSDHTATVEGKQSLTVVQDRTRQVQGNESVSVQQNRNVQVTGNQTLGVTGNHDISVTGKQTQTITSKQEVTIGAGRTLSITGGDTRFTQGSVTDSATDTVHINVGESGILISNGSVEITAGGSTITINAAGVMVNGKKIELNA

SEQ ID NO: 6417 - DNA, 540 bp, Enterobacter cloacae
  misc_feature (461)..(461): n is a, c, g or t
gtgttgcatatcacttcgcttaaactatccgcactgattcttctgccgttcatgctggcgggttgtgggctaacacagaaaatcagcgacggcgcttcgtccgccgtaaagtcagtattttatcgccaggtgaaaacgctgcgtctggattttagcgcgcgcaatgcgttaaacaccgataaccgcgaggataacagcgcctcccagccggtgatggtgcgggtctatgtgctgaaggatcgcaagactttcgataagacggtttaccagcaactggcggcggaaggagaggacatattaaaagacgaccaactggccagtcgcagcctggtgctcaaaccgggaacggcgatgagtctcaccatgccgctggatgaacaggcgcagtatgttgccgtggtggcgctgttccgggcgccggatctgacgaaaaacgactggaagctggtgcttgcccgtgnggatcttgacccggaccgcgcgcgcgtcattgaggccagccatcatcaacttgttctgcaaccgcggaaggagaagtga

SEQ ID NO: 6418 - protein, 179 aa, Enterobacter cloacae
  misc_feature (154)..(154): Xaa can be any naturally occurring amino acid
MLHITSLKLSALILLPFMLAGCGLTQKISDGASSAVKSVFYRQVKTLRLDFSARNALNTDNREDNSASQPVMVRVYVLKDRKTFDKTVYQQLAAEGEDILKDDQLASRSLVLKPGTAMSLTMPLDEQAQYVAVVALFRAPDLTKNDWKLVLARXDLDPDRARVIEASHHQLVLQPRKEK

SEQ ID NO: 6419 - DNA, 1131 bp, Klebsiella aerogenes
  misc_feature (208)..(208): n is a, c, g or t
atgcaaagcctgtccccaacatcgcgttaccttttagctctcaaagagggcagccatcaaccagacgacgtgcaacaagaagcggtcagccgcctcgataccatctatcgtgaactgcaggaaaaaccagccgccgcagcgcctgcgggcggcgggctgcgggcgaaattcagcaaactgctcggcaaacgcgaaccggcggcggaancgaccgccgtacgcggcctgtatatgtggggcggcgttgggcgcggcaaaacctggctgatggatatgttttatcaaagcctgccgggcgagcgtaaacagcgcctgcatttccatcgctttatgctgcgcgtacacgaagagttaactaccttgcaggggcatagcgacccgctggagatcgttgccgatcgctttaaagcgcaaaccgatgtgttgtgctttgacgagttttttgtctccgacatcaccgatgccatgttgctcggcggcttaatgaaagcgctgttctcgcgtgggattacgctggttgctacctcaaacatcccgccggacgagctctaccgcaatggtctgcagcgcgcgcgtttcctgccggcgatagaagccatcaaacagcattgcgacattatgaacgtcgatgcggggattgattaccgcctgcgcacgttaacccaggcgcatctgtggctgtcgccgctcaatgtcgagaccagccagcaaatggataaactctggctggcgctggcgggagccaaacgcgagcagatgccgacgctggaaattaaccaccggccgctgccgacgttaggcgtggaaaaccagactttggcggcgtcgttcgacacgctgtgcgtggatgcgcgcagccagcatgattacatcgcgctgtcacgcctgttccataccgtgatgttgttcgatgtgccggtgatgacgacgcatcttgagagcgaagcgcggcgctttatcgcgctggtggatgaattctacgaacgtcacgtaaaactggtggttagcgcggcggtgccgctgtatgagatctatcagggcgaacgcttgaagtttgagttccagcgctgtttatcgcgcctgcaggaaatgcaaagcgaagagtatctgaaacaaccgcacatgccctga

SEQ ID NO: 6420 - protein, 376 aa, Klebsiella aerogenes
  misc_feature (70)..(70): Xaa can be any naturally occurring amino acid
MQSLSPTSRYLLALKEGSHQPDDVQQEAVSRLDTIYRELQEKPAAAAPAGGGLRAKFSKLLGKREPAAEXTAVRGLYMWGGVGRGKTWLMDMFYQSLPGERKQRLHFHRFMLRVHEELTTLQGHSDPLEIVADRFKAQTDVLCFDEFFVSDITDAMLLGGLMKALFSRGITLVATSNIPPDELYRNGLQRARFLPAIEAIKQHCDIMNVDAGIDYRLRTLTQAHLWLSPLNVETSQQMDKLWLALAGAKREQMPTLEINHRPLPTLGVENQTLAASFDTLCVDARSQHDYIALSRLFHTVMLFDVPVMTTHLESEARRFIALVDEFYERHVKLVVSAAVPLYEIYQGERLKFEFQRCLSRLQEMQSEEYLKQPHMP

SEQ ID NO: 6421 - DNA, 567 bp, Klebsiella aerogenes
  misc_feature (250)..(250): n is a, c, g or t
atgggcaacactaagttggctaatccggcaccgctgggccttatgggctttggcatgaccactattctgcttaacctggcaaatagcggccttttcgcattcgatgtagctatcctggcgatgggcattttttacggcggcattgcgcaaatttttgccggcctgctcgagtataaaaaaggcaacacctttggtttaaccgcttttacgtcctacggctccttctggctgacgttggtcgcgatcctcntgatgccgaaaatgggcctggctgatgcgccgaacgcgcacttcctgggcatgtatctcggcctgtggggtatctttacgttgttcatgttcttcggcacgctgaaagccgcgcgcatgctgcagttcgtcttccttagcctgacggtactgttcgcgctgctggcgattggtcacctggtcgataacgaaggcattgttaaaattgccggttgggtcggcctggtatgcggcgcgagcgctatttacctggcgatgggtgaagtgttgaacgagcagttcggccgcaccgttctgccgattggcgagccacgctaa

SEQ ID NO: 6422 - protein, 188 aa, Klebsiella aerogenes
  misc_feature (84)..(84): Xaa can be any naturally occurring amino acid
MGNTKLANPAPLGLMGFGMTTILLNLANSGLFAFDVAILAMGIFYGGIAQIFAGLLEYKKGNTFGLTAFTSYGSFWLTLVAILXMPKMGLADAPNAHFLGMYLGLWGIFTLFMFFGTLKAARMLQFVFLSLTVLFALLAIGHLVDNEGIVKIAGWVGLVCGASAIYLAMGEVLNEQFGRTVLPIGEPR

SEQ ID NO: 6423 - DNA, 2292 bp, Klebsiella michiganensis
  misc_feature (277)..(277): n is a, c, g or t
gtgtcagagttgttatccatcgccttgtttctcgcctcggtggtgatctatgcctggaaagccggtcgcaacacctggtggttctctgccaccctggcggtgttggggctgtttgttgtgcttaatatcaccctgtacgccagcgactacttcaccggcgacggtattaacgatgcggtactctataccctgaccaacagcctgaccggcgcgggcgtcagtaaatatattctgccgggtatcggtctggtgctggcgctggtcgccgtatttggcnctctcggctggatattacgccgtcgccggcatcatccgcatcactttggctacagcctgattgcgctggtactggcgctggcctccgtcgacgccagcccggcgttccgtcaaatcaccgaactcgtgaaatcgcaatcccgcgacggcgatccggacttcacggcttactacaaagagccgtcgaaaagcatcaacaatccgcagcttaatctggtctatatctacggcgagagcctggaacgcacctatttcaataacgaggctttccccaaactaacgccggaactgggtaaaatcaaaagcgaagggctggatttcagcaacaccgcgcagcttcccggcaccgattacaccatcgccggcatggtcgcttcccagtgcggtattccgctgttcgcgccgttcgaaggcaacgcttccgcggcggtatccagcttctttccgcaaaatatctgtctcggcgatatcctgaaaaactccggttacgaaaactactttgtgcagggcgccaacctgcgttttgccggtaaagacgttttcctcaaatctcacggcttcgatcacctgtacggcgcggaagagctgaaaacaacggtggctgacccgtcctaccgcaacgactggggcttctacgacgacaccgtgctcgacgaaacgtggaaaaagttcgaagcgctctcccaatccggcaaacgcttttcgctgttcgctctcaccgtcgatacccaccaccctgacggctttatctcacgcacttgcgagcgtaaacgctatgacatggatggcaaaaagaacctctccttcagcgccgtggcctgtagccaggagcacatcgccgcgctgattgaaaagattaaggcctcgccgtacttcaaaaatacggtcatcgtggtttcgtccgatcatctggcgatgaagaacaccgcctgggattatctgaacaaacaggatcgcagcaacctgttctttatcctgcgcggcgaccagcctcaacaggatgtgctggccgtgaagcgtaataccatggataacggcgcaacggtattggatattctcggcggcgataactatatcggccttggccgcagcagcctttctgcagagtcgctctccactatcttcatgaacatgaaagagaaagtgctggcatggaaaccggacgtcattcgtctgtggaatttcccgaaagagattaagaatttcagcatcgactcgcagaagaacatgatcgcattctccggtagccacttccgtctgccgctgctgctgcgggtctctgatcagcgcgtcgagccgattccggaaagcgaatattccgcgccgctacgcttccaactggcggatttcgccccgcgcgacaacttcgtatgggtcgaccgctgctacaagatgggccaactgtggcggccggaactggcgctgtccaccgactggtgcgtctctcagggtcaactgggcggcgaacaaaaagtacagcatgtcgataagccgcagtggcagggcaaaaccgcctttaaagataccgtcatcgatatggagcgctataaaggcaacgtcgatacgttgaaaattgtcgataacgaaattcgctacaaagccgatagctttgtgtttaatgtcgccggcgcgccggaagaggtcaaacagttcagcggcatctcgcggcctgagctgtggggacgctggtctaatgcccagctcggtgacgaggtgaagattgaatataaaaaaccgctaccggaaaaattcgatctggtgatcaccgccaaagccttcggcccgaacgccaaccagccaataccggtgcgcgtcgggaaaagcgagcaagtacttactttagccaatgaagtgaccacgacgacgctgcatttcgacaatccggcgcgcagcaacatcttaacaatcactccgccggagccgcagtccaccaacgaaggcaatattgtcggccacgcgccgcgccagttgggcattggtatggtcgacattaaaatcgtcagtcgcgaaggttaa

SEQ ID NO: 6424 - protein, 763 aa, Klebsiella michiganensis
  misc_feature (93)..(93): Xaa can be any naturally occurring amino acid
MSELLSIALFLASVVIYAWKAGRNTWWFSATLAVLGLFVVLNITLYASDYFTGDGINDAVLYTLTNSLTGAGVSKYILPGIGLVLALVAVFGXLGWILRRRRHHPHHFGYSLIALVLALASVDASPAFRQITELVKSQSRDGDPDFTAYYKEPSKSINNPQLNLVYIYGESLERTYFNNEAFPKLTPELGKIKSEGLDFSNTAQLPGTDYTIAGMVASQCGIPLFAPFEGNASAAVSSFFPQNICLGDILKNSGYENYFVQGANLRFAGKDVFLKSHGFDHLYGAEELKTTVADPSYRNDWGFYDDTVLDETWKKFEALSQSGKRFSLFALTVDTHHPDGFISRTCERKRYDMDGKKNLSFSAVACSQEHIAALIEKIKASPYFKNTVIVVSSDHLAMKNTAWDYLNKQDRSNLFFILRGDQPQQDVLAVKRNTMDNGATVLDILGGDNYIGLGRSSLSAESLSTIFMNMKEKVLAWKPDVIRLWNFPKEIKNFSIDSQKNMIAFSGSHFRLPLLLRVSDQRVEPIPESEYSAPLRFQLADFAPRDNFVWVDRCYKMGQLWRPELALSTDWCVSQGQLGGEQKVQHVDKPQWQGKTAFKDTVIDMERYKGNVDTLKIVDNEIRYKADSFVFNVAGAPEEVKQFSGISRPELWGRWSNAQLGDEVKIEYKKPLPEKFDLVITAKAFGPNANQPIPVRVGKSEQVLTLANEVTTTTLHFDNPARSNILTITPPEPQSTNEGNIVGHAPRQLGIGMVDIKIVSREG

SEQ ID NO: 6425 - DNA, 705 bp, Klebsiella aerogenes
  misc_feature (412)..(412): n is a, c, g or t
atgcgtctggttcagctctctcgtgactctatcgccttcccttccccggaaggcgctctgcgtgaaccaaatggcctgctggcgctgggtggcgatctcagcccagcccgtttgttgatggcctatcagcgcggtatttttccatggttttctcccggcgaccctattttatggtggtcgcccgatccacgcgccgtactgtggccggagcaattccactatagccgtagcatgaaacgtttccatcaacgttcgccctatcgggtgacgctcaatcacgccttcggccaggttatcgagggctgcgccagccatcgcgatgaaggcacctggatcacccatggtatcgttcaggcctatcaccagttacatgaactcggtcatgctcactccatcgaagtatgggatgagnataggctggtcggcggcatgtatggcgtggcgcagggagcgctgttttgcggcgagtcgatgttcagccgggcggaaaatgcctccaaaaccgcgctaatgatcttctgtcaggcttttgcccagggcggtggcagattaattgactgtcaggttcttaatgcgcataccgcctctttaggagcgattgaaatcccgcgccgcgattatctcgattacctttccgtattacgcacctatcgcttaccggagcgattttgggtaccaagggtgctatttaccggtaatggataa

SEQ ID NO: 6426 - protein, 234 aa, Klebsiella aerogenes
  misc_feature (138)..(138): Xaa can be any naturally occurring amino acid
MRLVQLSRDSIAFPSPEGALREPNGLLALGGDLSPARLLMAYQRGIFPWFSPGDPILWWSPDPRAVLWPEQFHYSRSMKRFHQRSPYRVTLNHAFGQVIEGCASHRDEGTWITHGIVQAYHQLHELGHAHSIEVWDEXRLVGGMYGVAQGALFCGESMFSRAENASKTALMIFCQAFAQGGGRLIDCQVLNAHTASLGAIEIPRRDYLDYLSVLRTYRLPERFWVPRVLFTGNG

SEQ ID NO: 6427 - DNA, 555 bp, Klebsiella aerogenes
  misc_feature (5)..(5): n is a, c, g or t
atganccgcagaccgaacgatccgcagcggcgcgagcgcatcctgcaggcgacgctggataccatcgccgcgcacggaattcatgcggtaacgcaccgtaaaattgccagctgcgccggggtaccgctgggctcgctgacctattattttagcggtattgaggcgctgattgaggaagcgtttcgtaacttcaccgtcgaaatgtcggcgcagtatcagcaatttttcgacggcgtcggcagccgccaacaggcctgcgacgctatcgccgagctgatcttcagcgcccaagtgaccaccgcgcgcaatatggagttaatgtaccagctgtacgcgttttgcagcagccgaccagcactgaaaacggtcatgcagagctggatgctgcgcagccagcagacgctggagcagtggtttgaaccggcgacggcgcgcgggctggatgcgtttatcgaggggatgacgctgcacttcgtgaccgatagcgcgccgctgtcgaaagcggcgattcgcttaatggtcgggcggctggcgggggagaatagcgctagctaa

SEQ ID NO: 6428 - protein, 184 aa, Klebsiella aerogenes
  misc_feature (2)..(2): Xaa can be any naturally occurring amino acid
MXRRPNDPQRRERILQATLDTIAAHGIHAVTHRKIASCAGVPLGSLTYYFSGIEALIEEAFRNFTVEMSAQYQQFFDGVGSRQQACDAIAELIFSAQVTTARNMELMYQLYAFCSSRPALKTVMQSWMLRSQQTLEQWFEPATARGLDAFIEGMTLHFVTDSAPLSKAAIRLMVGRLAGENSAS

SEQ ID NO: 6429 - DNA, 1098 bp, Klebsiella aerogenes
  misc_feature (469)..(469): n is a, c, g or t
atggcactgtttgcgaccgaaacctggaccatgcgccaccgtctgctgctgaccatcggcgcgattctggtggtctgccagctgattagcgtattttggctatggcatgagagcaaagagcaaatccagctgctggttgccagcgccattgagggtcataacaatcaaaggcacgtcgaacatgaggtacgcgaagcggtcgccagcctgctggtgccaagcctgctgatcatcggtctggcgctatatatcagcctggtggcggtgaagaaaatcacccgtccgctatccaatctgcagagcgagctggaaagccggacgccggataatctgcaacccattattttgcaggagtcggtgccggaagtgaccgcagtgaccatggcgattaatcaactggtgtcgcggctgaccctgacgctcgaacgcgagcgtctgtttaccgccgacgtcgcccacgaactgcgtncccctcttgccgggctgcgcttgcatctggaactgctggcgaaggtacacggcgtcagcgttgatcccttaattcaacgtctcgatcagatgaccaacagcatttcgcagctgctacaactggcgcgcgtcgggcagtcgttttccgccgggagttaccagcaggtgcatttgcacgaagatgtggtggagcctctgcaggatgagttggcaacgatgctcgaagcgcgccaacagaccctggagatagaaagcggcgcaggcgaggatctcatttccggagatgcgaccctggcgcgggtgattttacgcaatctggtggagaatgcgcaccgctatagccccgtggggtcgaagattaagatttcggtaaaaccgggaaatacgccgattctggcagtagaagatgaagggccgggcattgatgaggccaaaagcggcgagctgagtaaagcgtttgtccgcatggacagccgctatggcggaataggcctcggtttaagcattgtcacccgcatcgctcaactacacgatgcgcaattctttttacataaccgccagcccggaccgggcgtccgcgcctgggtgctattcccgcgcagcgcgcgtcagaaggttaatacccattga

SEQ ID NO: 6430 - protein, 365 aa, Klebsiella aerogenes
  misc_feature (157)..(157): Xaa can be any naturally occurring amino acid
MALFATETWTMRHRLLLTIGAILVVCQLISVFWLWHESKEQIQLLVASAIEGHNNQRHVEHEVREAVASLLVPSLLIIGLALYISLVAVKKITRPLSNLQSELESRTPDNLQPIILQESVPEVTAVTMAINQLVSRLTLTLERERLFTADVAHELRXPLAGLRLHLELLAKVHGVSVDPLIQRLDQMTNSISQLLQLARVGQSFSAGSYQQVHLHEDVVEPLQDELATMLEARQQTLEIESGAGEDLISGDATLARVILRNLVENAHRYSPVGSKIKISVKPGNTPILAVEDEGPGIDEAKSGELSKAFVRMDSRYGGIGLGLSIVTRIAQLHDAQFFLHNRQPGPGVRAWVLFPRSARQKVNTH

SEQ ID NO: 6431 - DNA, 1476 bp, Klebsiella aerogenes
  misc_feature (772)..(772): n is a, c, g or t
atgtcatcattgcaaatttcgcaaggtacgtttcgccttagcgatataaaaaccttacatatcgatcgcctcacgctacgcgctggcgaaagctgggctttcgtcggcagtaacggtagcggtaaatcggcgctggccagagcgctggccggtgaactgactctgttaaacgggcagcgcgaaagcgcatttcagcgtatcactcgcctctccttcgaacagctgcagaaactggtcagcgacgagtggcaacgtaacaacaccgatatgctcagtcccggcgaagaagataccggtcgcaccaccgcggaaatcatcgaagatgaaagacgcgacccggaacgctgtacccggctggcggagcagtttggtattagccacctgctgacgcggcgctttaaatatctgtcgacgggcgaaacccgcaaaacgctcctctgccaggcgctgatgagcgacccagacctgctgattctcgacgagccgtttgatggcctggacgtcgcttcgcgccaacagttggccgacctgctggccagcctgcatcaggcaggcatcaccctggtactggtactcaaccgcttcgatgagatcccggaattcattgaatatgccggggtgctggcggattgcacgctgagcgaaaccggcgagaaacaggcgttattacaacaggcgctggttgcccaactggcgcatagcgaaaaacttgccggtatgacgctaccagaaccggatgcccccgccgcccggcacgacttagcggcgaacnctccgcttatcgtccttaacgacggcacggtgtcgtataacgataaagcgatcattaaccagctaagctggacggtgaaccccggcgaacactggcagattgtcggccccaacggcgcgggcaaatccacattgctgagcctgatcaccggcgaccatccacagggttacagcaacgacctgacgctattcggccgccgtcgcggtagcggtgagactatttgggatatcaaaaaacatattggctatgtcagcagcagcctgcatctggaataccgcgtcagcactaacgtgcgtaacgtgatcctttccggctactttgattcgataggcatttatcaggcggtctctgataagcagcacaagctggtccagcgctggctggatattctcggcattgataaacgcaccgccgacgcgccgttccatagtctgtcgtgggggcagcagcggttggcgctgatcgttcgcgcgctggtcaaacacccgaccctgctgatactcgatgaaccgttacagggactggatccgctgaatcgtcaactggtacgtcgttttgttgatgttttaattggcgaaggggccacgcagctgctgtttgtatcgcatcatgccgaagatgcccctgactgcattacccaccgtctggagttcattcgcagtggagacggttacacttaccgcctcggtccgctggcagaatag

SEQ ID NO: 6432 - protein, 491 aa, Klebsiella aerogenes
  misc_feature (258)..(258): Xaa can be any naturally occurring amino acid
MSSLQISQGTFRLSDIKTLHIDRLTLRAGESWAFVGSNGSGKSALARALAGELTLLNGQRESAFQRITRLSFEQLQKLVSDEWQRNNTDMLSPGEEDTGRTTAEIIEDERRDPERCTRLAEQFGISHLLTRRFKYLSTGETRKTLLCQALMSDPDLLILDEPFDGLDVASRQQLADLLASLHQAGITLVLVLNRFDEIPEFIEYAGVLADCTLSETGEKQALLQQALVAQLAHSEKLAGMTLPEPDAPAARHDLAANXPLIVLNDGTVSYNDKAIINQLSWTVNPGEHWQIVGPNGAGKSTLLSLITGDHPQGYSNDLTLFGRRRGSGETIWDIKKHIGYVSSSLHLEYRVSTNVRNVILSGYFDSIGIYQAVSDKQHKLVQRWLDILGIDKRTADAPFHSLSWGQQRLALIVRALVKHPTLLILDEPLQGLDPLNRQLVRRFVDVLIGEGATQLLFVSHHAEDAPDCITHRLEFIRSGDGYTYRLGPLAE

SEQ ID NO: 6433 - DNA, 750 bp, Enterobacter cloacae
  misc_feature (622)..(622): n is a, c, g or t
atgccgtttttgatgcagctacaggatgtagcggaagcggggcggttgtcgccgtttaccgctgacgtgcggcccggtgagataatccatctcgtggggccgaatggcgccggcaaaagtaccctgctggcgcgcatggccgggctgaccagcggtcccggtttgattacgcttaaccagcgggcgctggctcagtggcccgcagcggagcttgcccgccatcgcgcctatctgagccagcagcagctcccgcccttcgcgatgccggtgtggcactatctgtcgttacatatgcaggatagcgccgcgcaggagttgctcaacgagattgccgggcaactgggcttaagcgataagctggggcgccaggtcaaccagatctccggcggcgagtggcagcgggtgcgtctggcggcggtgatcctgcagattcaccggcgcgcgaatccagccgggcaactgttgttattggatgaaccaatgaacagccttgatgtggcgcagcaggcggcgctggataacgtgctggcgtcgctgtgcgcgctggggatcgctatcgtgatgagcagccacgatctcaaccatacattgcgtcatgcgcagagggcgtggctcatttgtnaggggcagatgattgcctgcggggaaacgtatgaggtgttaagtgaagagaatttgaccgccgcttatcatatcgctttccagcgggtggaagtcgcgggtcatcttatgctcgtggcgtcacagtag

SEQ ID NO: 6434 - protein, 249 aa, Enterobacter cloacae
  misc_feature (208)..(208): Xaa can be any naturally occurring amino acid
MPFLMQLQDVAEAGRLSPFTADVRPGEIIHLVGPNGAGKSTLLARMAGLTSGPGLITLNQRALAQWPAAELARHRAYLSQQQLPPFAMPVWHYLSLHMQDSAAQELLNEIAGQLGLSDKLGRQVNQISGGEWQRVRLAAVILQIHRRANPAGQLLLLDEPMNSLDVAQQAALDNVLASLCALGIAIVMSSHDLNHTLRHAQRAWLICXGQMIACGETYEVLSEENLTAAYHIAFQRVEVAGHLMLVASQ

SEQ ID NO: 6435 - DNA, 1488 bp, Klebsiella aerogenes
  misc_feature (397)..(397): n is a, c, g or t
atgtctcgaaatactgaagcaactgacgatgtcaaaagctggaccggcggcccgctcaactataaagaaggcttttttacccagctacaaaccgatgagctggccaaaggcattaatgaagaggtggtacgcgcgatttccgctcgtcgtaatgaaccggagtggatgctcgaatttcgtctcaacgcctttaaggcctggcaggagatggaggagccgcactggctgaaagcgcattacgataagcttaattatcaggattacagctactactcggcgccatcctgcggcaactgcgacgagacctgcgcctcggagcccggcgcggtgcaacagaccggggcaaacaccttcctgacaaatgaagtcgaggaggcctttaacctgctcggggtancggtacgcgaaggcaaagaagtggcggtggacgccattttcgactcggtatcggtggcaaccacctatcgcgagaagctggcggagcaggggatcatcttctgctcctttggcgaagcgattcacgatcatccggaactggtgaaaaagtacctcggtaccgtggtgccgggcaacgacaacttcttcgctgcgctgaacgccgcggtcgcttccgatggcacctttatctacgtgccgaaaggtgtgcgctgtccgatggagctgtcgacctatttccgtatcaacgccgagaaaaccggccagtttgaacgtacgattctggtcgccgacgagggtagctatgtgagctatatcgaaggctgctcggcgccggtacgcgacagctatcagctgcatgcggcggtggttgaagtcatcattcataaagatgcggaagtgaagtactccaccgtgcagaactggttccccggcgacaacaataccggcggcatccttaatttcgtcaccaagcgcgcgctgtgcgaaggcgaaaacagcaagatgtcgtggacccagtcggaaaccggttcggctataacatggaaatacccgagctgcattctgcgcggcgataactcgatcggcgaattcttctcggtggcgttgaccagcggccatcagcaggcggataccgggaccaaaatgattcatatcggcaagaacacccgttcgaccattatctcgaaagggatctccgccggccacagccagaatagctaccgcgggctggtcaaaattatgccgaccgcgacgaacgcccggaacttcacccagtgcgattcgatgctgataggcccggactgcggagcgcataccttcccgtacgtcgaatgccgcaataacagcgctcagctggaacacgaagccaccacctcgcggattggcgaagatcagctgttttactgcctgcagcggggtattagcgaagatgatgcgatctcaatgatcgtcaatggattctgtaaagacgtgttctcagaattgccgctggagttcgccgtcgaagcgcaaaaattgctggctattagccttgaacatagcgtcggctga

SEQ ID NO: 6436 - protein, 495 aa, Klebsiella aerogenes
  misc_feature (133)..(133): Xaa can be any naturally occurring amino acid
MSRNTEATDDVKSWTGGPLNYKEGFFTQLQTDELAKGINEEVVRAISARRNEPEWMLEFRLNAFKAWQEMEEPHWLKAHYDKLNYQDYSYYSAPSCGNCDETCASEPGAVQQTGANTFLTNEVEEAFNLLGVXVREGKEVAVDAIFDSVSVATTYREKLAEQGIIFCSFGEAIHDHPELVKKYLGTVVPGNDNFFAALNAAVASDGTFIYVPKGVRCPMELSTYFRINAEKTGQFERTILVADEGSYVSYIEGCSAPVRDSYQLHAAVVEVIIHKDAEVKYSTVQNWFPGDNNTGGILNFVTKRALCEGENSKMSWTQSETGSAITWKYPSCILRGDNSIGEFFSVALTSGHQQADTGTKMIHIGKNTRSTIISKGISAGHSQNSYRGLVKIMPTATNARNFTQCDSMLIGPDCGAHTFPYVECRNNSAQLEHEATTSRIGEDQLFYCLQRGISEDDAISMIVNGFCKDVFSELPLEFAVEAQKLLAISLEHSVG

SEQ ID NO: 6437 - DNA, 1008 bp, Klebsiella aerogenes
  misc_feature (134)..(134): n is a, c, g or t
gtgcaaaacaaaacttttcccatggatattggctggctggcaatactgaaggacttaggtgttcagcctggccatgtattacgtcgggccggccttccagacgatttactctcccgtacaagacaggggctttntggcgaagactattttcgtttctggcgcgctttagaggctgaggcaagtgatgccatgtttcccttacgcctcgtcgagattctctcggctgattctttcaacccaccactgttcgctgccctgtgcagcgcgaatctggtacaggctttgcagcgcctcgccaaatacaagcaactggtggcgcccatgagcctggaagtcaatacgggtgacgcaggcgagctggtcgtgacgcctcgctggttgtcgatacaaaccgaggtaccttactcgctgcaagtggccgagattgcgtttttcgtgcgactagccagactggctacccgtgagcacattaaggcgcatcgcgttatcctgccgcaacttccgtccagtcgttatctccggcgttacgagaatttcttcggcgtacctgtgcaaaagggagagtatccagttatcgctttcgccgctgtggatgctttgcgtccattcctgacggtcaacgaaagcatgtttcacgcgttcgaacccgatcttcgccgacggctcagtgaacttgattcgacggcgtcgacggcggaacgcgtgcgtgctgtcttactggagctgttgcctggtaatgcggctaccattgagaaggccgcggaacgactgggcttgagtaagcgtacgcttcaacgtcggcttgaggaggagggggaaaactttcgcgccctggtcaatatggtgcgggagagccttgcccgacactacctggcaaataccacgatgtccggcgcagagatcgctttcctccttggattcgaagatcccaattccttttatcgcgcattccaggggtggactggaaaaacacctgacagcgtccgtcatgccatgcgcttgaattga

SEQ ID NO: 6438 - protein, 335 aa, Klebsiella aerogenes
  misc_feature (45)..(45): Xaa can be any naturally occurring amino acid
MQNKTFPMDIGWLAILKDLGVQPGHVLRRAGLPDDLLSRTRQGLXGEDYFRFWRALEAEASDAMFPLRLVEILSADSFNPPLFAALCSANLVQALQRLAKYKQLVAPMSLEVNTGDAGELVVTPRWLSIQTEVPYSLQVAEIAFFVRLARLATREHIKAHRVILPQLPSSRYLRRYENFFGVPVQKGEYPVIAFAAVDALRPFLTVNESMFHAFEPDLRRRLSELDSTASTAERVRAVLLELLPGNAATIEKAAERLGLSKRTLQRRLEEEGENFRALVNMVRESLARHYLANTTMSGAEIAFLLGFEDPNSFYRAFQGWTGKTPDSVRHAMRLN

SEQ ID NO: 6439 - DNA, 669 bp, Klebsiella oxytoca
  misc_feature (553)..(553): n is a, c, g or t
atgttaactcgcgaacaaatggcgatgcgcgtcgcccaggaaatgcgcgacggcgattatgtcaatctcggtatcggcattcccacgctggtcgctaactatattcctgccggtattgaagtgatgctgcagtcggaaaacggcctgttggggatgggcgaatttcccgatgagtcaacgattgatgccgacatgattaacgccggcaagcagaccgttaccgcccaaaccggggcggcaatttttgactccgcccagtccttcgccatgatccgcggcggccacgtcgatctcacggtcctcggcgcttttgaagtcgatgtcgcgggtaatatcgcctcgtggatgatcccaggaaaaatggtgaaaggcatgggcggcgccatggatctggtggctggcgcgcaaaacatcatcgtggtgatgacgcacgcctcgaaaaacggcgaatccaaactactcccgcaatgtaccctgccgctcaccggcgcgggctgtattcgccgggtactcaccgatctcgcgctactggaaattagcgacggcgcctttnttctgcgcgaatacgcccccggcgtcagcattgacgaaattgcccgtaaaacggccggacggctggtcattgccgatgacgtccgcgaaatgcgcttcactaaggaggcaatatga

SEQ ID NO: 6440 - protein, 222 aa, Klebsiella oxytoca
  misc_feature (185)..(185): Xaa can be any naturally occurring amino acid
MLTREQMAMRVAQEMRDGDYVNLGIGIPTLVANYIPAGIEVMLQSENGLLGMGEFPDESTIDADMINAGKQTVTAQTGAAIFDSAQSFAMIRGGHVDLTVLGAFEVDVAGNIASWMIPGKMVKGMGGAMDLVAGAQNIIVVMTHASKNGESKLLPQCTLPLTGAGCIRRVLTDLALLEISDGAFXLREYAPGVSIDEIARKTAGRLVIADDVREMRFTKEAI

SEQ ID NO: 6441 - DNA, 2400 bp, Enterobacter cloacae
  misc_feature (454)..(454): n is a, c, g or t
atggacgaacaaaaaggtcatggtcgaaggattttcttcaccatctaccgattgctttttgtgttactgagttttggcattgggattttcttaactatctgggggggcaagctgctctcgctcggcggcagcgcctggtatctgttagccggtctcgcttatcttatcatcgccgttgggtacttcactcgtagtcaatacgcgctgcctcttgctgttattaccttcctgttaacgctggtctgggcgctgtatgaagtgcagctcagctactggggcctgatccctcgtctggtggttcctgcgctgatgctaatgctggccctgtggctggcggcggcgatgccggtggctcgcgtgcgtctggcgaactggagcgccacggttatttttatcgcgctgctggcgacgctggtttcggcgttctacccgcacggcggcatccacaatggcntcgtgaaagcggcgagcgacaatagcgcgacgcaggcggcaaaaagcgataactgggagttctttggccgcgatgcctccggcacccgttttgcgccgtataccgatattaccccggaaaacgttcataagctgaaagtcgcctggacttaccacacaggccgccgcctgaccggcccggccatcggcgttgacgaaaatacgccgctgcaaattggcgatacgctctattcctgtacgccgctcaacgtggtgaccgccattgatgccgataccggtaaggcgcgctggcgctttgacccgcacgcgcagacggcggaacatgtgacctgccgcggtgtgggttactatgacgtgcagagcgacgatacgctcagcgcggaagaaaaagcgagcccggcgttgcaacagtgtccgcagcggatcatggtatcgaccgtggatgcgcgcctgctggcgctgaatgccaaaaccggcgaactgtgcgctgatttcggcgaccacggtagcgtggatctgaagcagggcatgggcgacaccgaaaacagcaaacgctaccatccgacttcaacgccggtgatcatggggcatattgcggtgctgggcggctgggtacgcgatatcgtacacggcgagccatccggggtcgtacgcgcttttgacgtacgcgatggtaaagtcgtctgggcctgggatgttggcaagccggaaaatatcaccgacccggaaaaaggccgcgtttataccctcgaaacgccgaacgtgtggaccattcccggctttgataaagagctgaatctggtctatctgccgaccggcaacggtccgccggactactggggcggcgatcgtaatgaagcgaaagagaaatatggctccgcggtggtggcggtggatgccagtaccggtaaaacaaaatgggttttccagaccgttcaccacgatatctgggattatgatctcccatcgcagccggtactgttccacatgaaaaacgagcagggcgaggacgtcccggtgctgatccagaccaccaaaaccggacagatttacgtgctcgatcgccgcactggtaaaccggtgacccgtgttgaagagctgcccgtcgctcatcagggggcggagggcgaacatctgtctgccacccagccgttctctaccggcatgccgcagcttggcgtcgagccgttgagcgaaaaatcaatgtggggcgtgacgccgttcgaccaactgatgtgccgtatcgattttaaagagtcgacctaccttggcatgtatacgccgccgtcagagaaaccgtatatcgagtggccaagcctgctcggcggcatgaactggggcggcatcaccatcgatgaacgtaccggtacgctgttcgtcaacgatatgcgtatgccgttgcggatgtcgctggtgcgcaaggaagagatggcgaaatacaaagtctccaccgacgaagtccctggatttatgggtaccgttcgcccgcaagttgccgggccttacggcggcgtgcgtatcgacatcctgcagtccgcgctgggcgtgccctgtaataccccgccgtttggtaccatgagcgctattgacctgaatagccgtcagctactgtggcaggtgccgatgggctcggtggaagataccggtccgctggggatgaaaacccatctgcatatcccgctgggaatgccgaccctgggcggcccaacctctaccgcctctgggctggtattcttcgccggtacccaggataactacctgcgggcgctggattccgccagcggtaaagagctgtggcgcgctcgcttgccggttggcgcggtagcggcgccgctggtctacaaatcgccgaaaaccggcaaagagtatgtgctgatttccgccggcggcgccagccactcgccggacgtcggggacgatatcatcgcctacgcgctggaggaataa

SEQ ID NO: 6442 - protein, 799 aa, Enterobacter cloacae
  misc_feature (152)..(152): Xaa can be any naturally occurring amino acid
MDEQKGHGRRIFFTIYRLLFVLLSFGIGIFLTIWGGKLLSLGGSAWYLLAGLAYLIIAVGYFTRSQYALPLAVITFLLTLVWALYEVQLSYWGLIPRLVVPALMLMLALWLAAAMPVARVRLANWSATVIFIALLATLVSAFYPHGGIHNGXVKAASDNSATQAAKSDNWEFFGRDASGTRFAPYTDITPENVHKLKVAWTYHTGRRLTGPAIGVDENTPLQIGDTLYSCTPLNVVTAIDADTGKARWRFDPHAQTAEHVTCRGVGYYDVQSDDTLSAEEKASPALQQCPQRIMVSTVDARLLALNAKTGELCADFGDHGSVDLKQGMGDTENSKRYHPTSTPVIMGHIAVLGGWVRDIVHGEPSGVVRAFDVRDGKVVWAWDVGKPENITDPEKGRVYTLETPNVWTIPGFDKELNLVYLPTGNGPPDYWGGDRNEAKEKYGSAVVAVDASTGKTKWVFQTVHHDIWDYDLPSQPVLFHMKNEQGEDVPVLIQTTKTGQIYVLDRRTGKPVTRVEELPVAHQGAEGEHLSATQPFSTGMPQLGVEPLSEKSMWGVTPFDQLMCRIDFKESTYLGMYTPPSEKPYIEWPSLLGGMNWGGITIDERTGTLFVNDMRMPLRMSLVRKEEMAKYKVSTDEVPGFMGTVRPQVAGPYGGVRIDILQSALGVPCNTPPFGTMSAIDLNSRQLLWQVPMGSVEDTGPLGMKTHLHIPLGMPTLGGPTSTASGLVFFAGTQDNYLRALDSASGKELWRARLPVGAVAAPLVYKSPKTGKEYVLISAGGASHSPDVGDDIIAYALEE

SEQ ID NO: 6443 - DNA, 2259 bp, Klebsiella aerogenes
  misc_feature (239)..(239): n is a, c, g or t
atgagcgatatggcagagcgcctcgcgctacatgaattcacggaaaatgcctacctgaactactccatgtacgtcatcatggacagggcattaccgtttattggcgatggcttaaagccggttcagcgccgcattgtctatgcaatgtccgagctgggcctgaacgccagcgccaagttcaaaaaatccgcccgcaccgtcggcgatgtgttgggtaaatatcacccgcacggcgacancgcctgttatgaagcgatggtgctgatggcgcagccgttctcttaccgctacccgctggtagacgggcaggggaactggggcgcgccggacgatccgaaatccttcgcggcgatgcgttacaccgaatcccgcctgtcgaaatacgccgaactgctgctcagcgaactgggtcagggcaccgtcgattgggtgccgaactttgacggtacgctgcaggagccaaaaatgctgccggcgcgtctgccgaacatcctgctgaacggtaccaccggcattgcggtcggtatggctaccgatattccgccgcacaacctgcgtgaagtggcgcaggcggcgattacgctgctggaaaaaccgaaaaccacgctcgatgagctgctggatatcgtgcaggggccggactacccgaccgaagcggaaatcattaccccgcgcgcggaaattcgcaaaatctaccagaacggccgcggttcggtgcgcatgcgcgccgtgtggacgaaagaagacggcgcggtggtgattagcgcgctgccgcatcaggtgtccggcgcgcgcgtgctggaacagatcgccgcgcagatgcgtaacaaaaagctgccgatggttgatgatctacgtgatgaatcggatcatgaaaacccgacccgtctggtgatcgtgccgcgttccaaccgcgtggatatggagcaggtgatgaaccacctgttcgccaccaccgatctggaaaagagctaccgcatcaacctcaacatgatcggcctggacaatcgtccggcggtgaaaaacctgcttgaaatcctgacggagtggttgaccttccgtcgtgataccgtgcgtaaccgtctgaactaccgtctggaaaaagtcctcaagcgcctgcacatcctcgaaggtttgctggtcgcgttcctcaacattgatgaagtgattgagataatccgccacgaagatgaaccgaagccggcgctgattgcccgtttcggcatcagcgaaacccaggcggaagcgattctggaattaaaactgcgtcatctcgccaggctggaagagatgaagatccgcggcgagcagagcgagctggaaaaagagcgcgatcagctgcaggcgattctggcttccgaacgcaagatgaataacctgctgaagaaagagctgcaggccgatgccgatacctttggcgacgatcgccgttcgccgctgcgcgagcgcgaagaagcgaaggcgatgagcgagcacgatatgctgccgtccgagccggtcactatcgttctgtcgcagatgggttgggtgcgtagcgccaaaggccacgatatcgacgcgcagggactgagctacaaagccggtgatagctggaaagcgtcggtgaaaggcaagagcaaccagccggtggtgtttattgataccaccgggcgcagctacgccatcgacccgattacgctgccttctgcccgcggccagggcgagccggtcaccggtaaagtgacgctgccgccgggcgccagcgtagaacatatgctgatggagtcagacgatcagaggctgctgatggcctccgatgccggctacggtttcgtctgtaccttcaacgacctggtggcgcgcaaccgcgccggtaaggcgctgattacgctgccggagaacgcgcatgtgatgccgccgctggtcattgaagacgatgccgatatgctgttggcgattacccatgccggacgcatgctgatgttcccggtgagcgatctgccgcagctgtcgaaaggcaaaggcaacaagattatcaacattccgtcggcggaagccgcctccggccaggatggtctggcgcacctgtttgtcctgccgccgcagagcacgctaactatccacctcggcaagcgtaagatcaaactgcgtccggaagagctgcaaaaagtcaccggcgagcgcggccgtcgcggttcgctgatgcgcggcctgcagaaaatcgaccgcgtggagatcgactccccgcgccgcgcctcagctggcgacagcgaagagtaa

SEQ ID NO: 6444 - protein, 752 aa, Klebsiella aerogenes
  misc_feature (80)..(80): Xaa can be any naturally occurring amino acid
MSDMAERLALHEFTENAYLNYSMYVIMDRALPFIGDGLKPVQRRIVYAMSELGLNASAKFKKSARTVGDVLGKYHPHGDXACYEAMVLMAQPFSYRYPLVDGQGNWGAPDDPKSFAAMRYTESRLSKYAELLLSELGQGTVDWVPNFDGTLQEPKMLPARLPNILLNGTTGIAVGMATDIPPHNLREVAQAAITLLEKPKTTLDELLDIVQGPDYPTEAEIITPRAEIRKIYQNGRGSVRMRAVWTKEDGAVVISALPHQVSGARVLEQIAAQMRNKKLPMVDDLRDESDHENPTRLVIVPRSNRVDMEQVMNHLFATTDLEKSYRINLNMIGLDNRPAVKNLLEILTEWLTFRRDTVRNRLNYRLEKVLKRLHILEGLLVAFLNIDEVIEIIRHEDEPKPALIARFGISETQAEAILELKLRHLARLEEMKIRGEQSELEKERDQLQAILASERKMNNLLKKELQADADTFGDDRRSPLREREEAKAMSEHDMLPSEPVTIVLSQMGWVRSAKGHDIDAQGLSYKAGDSWKASVKGKSNQPVVFIDTTGRSYAIDPITLPSARGQGEPVTGKVTLPPGASVEHMLMESDDQRLLMASDAGYGFVCTFNDLVARNRAGKALITLPENAHVMPPLVIEDDADMLLAITHAGRMLMFPVSDLPQLSKGKGNKIINIPSAEAASGQDGLAHLFVLPPQSTLTIHLGKRKIKLRPEELQKVTGERGRRGSLMRGLQKIDRVEIDSPRRASAGDSEE

SEQ ID NO: 6445 - DNA, 1641 bp, Klebsiella aerogenes
  misc_feature (562)..(562): n is a, c, g or t
atgagcgaaatgataaccgtcggcgatgccatcgccagaacgctggagcagtatcacgttgaagccatttatggcgtcatttctatccataacctgccgatcgccgacgccgtcggccagcgggaaaaaatccgctttgttccggcgcgcggtgaagcgggctcggtgaccatggctgacgcccacggccgtttttccgggctcggcgtggcgctgaccagtaccggcgcgggcgcgggtaatgcggttggcgcgctggttgaggcgatgaacgccggtacgccgctgctgcacctcaccggacaggtcgaaaaagcctggctggacgccgacaccggttttattcatgaaacccgcgatcagttgaccttcctgaaagccagttcgaagcgcgcttaccgcattagcaacgccaaccaggcggtggctatcctgcataaggcgattcaggaggcgcagacgccaccgtgcggcccggtatcggtggaaattcccatcgatattcagagcgccaaaattccgctttcactgctgaccgcgccgttggaacgcgctccggcgnttgagccggaagtgtcgctggtcgatgcgctgtgggcgcagcttaagcaggcgaagcagccgctgctgtggcttggcggcggcgcgttagagagcggcgaggcggtgaagacgctggcggatgccggggtgacggtgatttccagtacccacggccgcggcattctggcggacagccatcgcgccagcctacgcgcgtttcataattctccctcggttgaagcgctgatttcacaatgtgatttcacacttgttgccggttcccggctgcgcagcaacgaaacgcgctcgtggacgttggagctgcccgcgccgcgggtgcagattgatatcgacccggcggcggccagccgtaactacctgatggacaacacgctggtggcggactgccgcgctttattagacgcgctggcgaagcgagtacagggccggatgtggggcgatgcgcgttgggatagccagcttaaagcggcggtagaggcggcggagcaggggctgcgcgaccagtgcggcgcttacgctaaattgaatgacgcgattgcgcaggcgctgcccgatgacggcatcctggtgcgcgatattaccgtttccggcagcctgtggggcagccgcctgttccgcgctcacggcccgctgatgaatatccattctctggccggcgccatcggtatggggctaccgatggcggtgggcaccgcgattgccaatccgcaacggaaagtggtcggcctggtcggcgacggcggcctgagcctcaaccttggcgagctggcgactctggcgcaggagaaggccaacgtgacgctgttgattatgaacgatggcggctacggcgtgatgcgcggtattcaggataagtactttggcggccgccagtattacaacgagctgcacacgccggactttaccctgttggcgcaggcgattggcctgcaggcgtggagcgtggaacgggcggaggatttccaggcggtgatgaccgaggcgctggcgatgccggggccatcggtggtggaagtgaaaatgggccagattggcgcgctgcgctttgccggcccgccgcagaagacgctgtattaa

SEQ ID NO: 6446 - protein, 546 aa, Klebsiella aerogenes
  misc_feature (188)..(188): Xaa can be any naturally occurring amino acid
MSEMITVGDAIARTLEQYHVEAIYGVISIHNLPIADAVGQREKIRFVPARGEAGSVTMADAHGRFSGLGVALTSTGAGAGNAVGALVEAMNAGTPLLHLTGQVEKAWLDADTGFIHETRDQLTFLKASSKRAYRISNANQAVAILHKAIQEAQTPPCGPVSVEIPIDIQSAKIPLSLLTAPLERAPAXEPEVSLVDALWAQLKQAKQPLLWLGGGALESGEAVKTLADAGVTVISSTHGRGILADSHRASLRAFHNSPSVEALISQCDFTLVAGSRLRSNETRSWTLELPAPRVQIDIDPAAASRNYLMDNTLVADCRALLDALAKRVQGRMWGDARWDSQLKAAVEAAEQGLRDQCGAYAKLNDAIAQALPDDGILVRDITVSGSLWGSRLFRAHGPLMNIHSLAGAIGMGLPMAVGTAIANPQRKVVGLVGDGGLSLNLGELATLAQEKANVTLLIMNDGGYGVMRGIQDKYFGGRQYYNELHTPDFTLLAQAIGLQAWSVERAEDFQAVMTEALAMPGPSVVEVKMGQIGALRFAGPPQKTLY

SEQ ID NO: 6447 - DNA, 4944 bp, Klebsiella variicola
  misc_feature (4913)..(4913): n is a, c, g or t
atgaaaccatttcgtttagcggcgctatcgttagcgctccttaccgcgctctcattaagcggctgcgataacagcggcgaaccacaggccgtatcggcggccgataaaggcgccgccgatagcgcgaaaaagccggatagcgcgcagctggcgacgttaaaagaaaaaagccagggcaaggcgctgacgttgctcgacgcttctgaagtgcagctagatggcgcggcgacgctggtgctgaccttctccattccgctcaaaccggatcaagatttctcccacagcgtccatctggtcgataagaaaagcggcaaggttgacggtgcgtgggagctggcgccgaatctcaaagagctgcgtctgcgccacctcgagccaaagcgcgaattgatagtcaccgttgatccaacgctcattgccctcaatgacgccaccctcggcagcccttttgaaaaaaccatcgccactcgcgatatcgcgccgagtgtcggtttcgccagccgcggctcgctgctgccggggaaagtggtcgccgggctgccggtgatggcgctgaacgtcgacaatgtcgatgtcaatttcttccgtattaagccggaatcactctcagccttcgtcagtcagtgggaataccgtaactcgttaagtaattgggaatcagacgaactgttgaagatggccgacctggtttatagcggacgcttcgatctcaacccggcgcgtaatacccgtgaaaagctgctgctgccgcttaacgacatcaagccgctccagcagccaggcgtctatgtggcggtgatgaacccggccggtcattatagctacagtaacgcggcaacgctgttcaccctcagcgatatcggcgtctcggcgcatcgctaccacaaccggctcgatgtcttcacccagagcctcgaaaatggcgccgcgcagtcgggaattgaagtgcaattgctaaacgccaaagggcagacgctggcgcaggcgaaaagcgatagccagggtcatgttactctgcaaaccgataaagaggcggcgctgctgctggcgcgaaaagacgggcagactacgctgcttgaccttaaactgccggcgctggatctggcggaattctccatcgctggcgcccctggcttcagtaaacagttctttatgtttggcccgcgcgatctctatcgcccgggggaaacggttatccttaacgcgctgttgcgcgacggcgatggaaaaccgctggcggagcagccggtgaagctggaagtggtgcagccggatggccaggtgattcgctctgtgatgagcaaaccggtcaatggcctgtatcagtttacttatccgctcgacagcggcgccgccaccggtatgtggcacattcgcgccagcaccggcgataatcaaccccgcgagtgggatttccacgtcgaagactttatgcccgaacgcatggcgctgaatctgacgccgcaggccgcgcctatcgccccggatgccgacgtcgcctttagcgtcagcggcgcctatctttacggcgcgccggccagcggcaatcagctgcagggcaaactgttcctgcgtccgctacgcgacgccgtagctgcgctgccgggcttccagttcggcgatatcgcggaagaaaatctctcccgtagcctcgatgaagtgcagctgacgctggatgaaaaaggccatggagaagtgaccaccgcgagccagtggcaggatagccattcgccgctgcaggtcgtgttgcaggccagcctgctggaatcaggcggccgtccggtgacccgtaccgtacagcagccgatctggcctgccgaggcgctgccggggatccgcccgcaatttacgctgaaggacgtttacgactaccgcaccgataccacggtgaaacagccggtagtcgatgaaaacagtaacgccgcttttgacatcgtctatgccgatgccagaggcgagaaaaaagcggtctccgggctgcaggtgcggctgatccgcgagcggcgcgattactactggaactggtccgatagcgaaggctggcagtcgcagttcgatcaaaaagatctgcaggagggcgaaacgtcgctggatttgcaggccgggcagataggtaaagtgagtttcccggtagagtggggctcgtatcgtctggaggtgaaagggccggatgacgttgtcagcagcgtgcgcttctgggcgggctatagctggcaggataacagcgaaggcaccggcgcggcgcgtcctgatcgcgtaacgatgaagctcgacaaacctggctataaaccgggcgacaccatcaagctgcatattgccgccccggcggcgggtaaaggctacgcgatggtcgaatccagcgaagggccgctgtggtggcaggaaattgacgtcccggcggagggcatggatctgtctattccggtggataaagcctggaatcgccacgatctctacctcagcacgctggtggttcgccccggcgataaatcgcgatcggcgacgccgaaacgcgcggtcggcctgctgcatctgccgctgggcgatgaaaaccgccgtctgtctctggcgctggaagcgccggagaaaatgcgcccgaaccagccgctgacggtgaaagtgaaggccagcgtgaaagagggcgaggtgccgaaacaggttaacgttctgctctcggcggtggatagcggggtgctgaatattaccgattacgctacgccggatccgtggaacgcgttcttcggccagaaacgttacggcgcggatatttatgacatctacggtcaggtgatcgaagggcaagggcgattagccagtctgcgcttcggcggcgatggcgacgagttaaaacgcggcggcaaaccgccggttaatcacgtgacgatcgtcgctcagcaggcgcagccggtagtgttggacgatcggggtgaaggctcggtgacattacccatcggcgattttaacggcgagctgcgggtgatggcgcaggcgtggacggcagacgacttcggcagcagcgaagataaagtggtggtagccgccccggttatcgcggaactaaataccccacgtttcctcgccagcggcgacgccacgcgtctggcgctggatctcagcaatctgaccgacaaaccgcaaaccctgcaggtacatcttaccgccagcgggttggtcacgttgaccgagggccaactgccgccggtacagttggcgccgggcgcgcgcagcacgctgtttgtgccggtgaccgcgttagcggggttcggcgatggtcaggtcaacgccactatcagcggtctgagcctgccgggcgaaaccttcgcgtcgctgcaaaaacagtggaaaatcggcgtacgtccggcattcccggcacagaccgtcaatagcggcgcggtgctacaacctggcgaaagctggcaggcgccggcggcgcagagtcaggggtttgccccgcaaacgctgcagggccaactgctgctcagcggtaaaccgccgttgaatctcgcccgctatattcgcgagctgaaagcctatccttatggctgccttgagcagaccgccagcggcctgttcccttctctgtacaccagcgcggcgcagctaaaagcgctgggcatcagcggcgatagcgatgagaaacgccgcgcggcggtcgatgttggtatctcgcgcctgctgcagatgcagctggaaaatggcggctttgcgctatgggataaagccggcccggaagagtactggttgaccgcctacgccatggacttcctcgtccgcgcgggtgagcagggctatagcgtgccggtcaacgcgattaataagggcaacgagcgcctgctgcgctatctacaggaaccgggtttgatgaccgtgcgctacagcgacgatgcccaggccagccgttttgccgctcaggcatatgccgcgctggtgctggcgcgccagcaaaaagcgccgctcggcgccttgcgtgaaatctggagccgtcacgaacaggcgcgttctggattgccgctgctgcaactcggtattgcgctgaaaaccatgggggatgcgccgcgcggcgcagaggccatgaagttggcggttaccacgccgcgccaggatgagaatcgctggctgggcgattacggcagccaacttcgcgatgatgcgctgaagctggcgctgctggaagagaataagctgctgccggaggtgcaaaaccagctgttgagcagcttgtcggaagaggccttcggtcagcgctggctgtcgacgcaggaaaccaacgcgctgttccttgccgggcgtacgcttgccgacctgccgggcaactggcaggcgcaaacctcgctgcaggcggagccgcttgccagcgacaaagcgcaaacccgcaatctcgacggcgatcggctggcggcgctgcaggtgacgaataccggcaatcagccgctgtggctgcgcctcgatagcagcggttatccgcaaagcgcgccacagccgggcggcaacgtgttggggattgaacgtgctattttcgatacccacggtcagcagaaatcgctgacttcgctgcgcagcggcgaactggtgctggtcaagctggaggtgaccgccaaacgtaacgttcctgacgcgctggtggtcgatctgctgccggcgggacttgagctggaaaaccagaacctggctaatagcagcgccagcctgcaggagaatggcgaagcggtacaaaacctgcttaaccagatgcagcaggcggatattcagcatatcgagttccgcgatgaccgctttgtcgccgccgtcgccatcaatgaaggtcagccggtgacgctggtctatctggcgcgggcggtgacgccgggcacctatcaggttccgcaaccgcaggtggagtcgatgtatgtaccgcagtggcgggcgaccggaanggccagcggcccgcttaccgttacgccgtaa

SEQ ID NO: 6448 - protein, 1647 aa, Klebsiella variicola
  misc_feature (1638)..(1638): Xaa can be any naturally occurring amino acid
MKPFRLAALSLALLTALSLSGCDNSGEPQAVSAADKGAADSAKKPDSAQLATLKEKSQGKALTLLDASEVQLDGAATLVLTFSIPLKPDQDFSHSVHLVDKKSGKVDGAWELAPNLKELRLRHLEPKRELIVTVDPTLIALNDATLGSPFEKTIATRDIAPSVGFASRGSLLPGKVVAGLPVMALNVDNVDVNFFRIKPESLSAFVSQWEYRNSLSNWESDELLKMADLVYSGRFDLNPARNTREKLLLPLNDIKPLQQPGVYVAVMNPAGHYSYSNAATLFTLSDIGVSAHRYHNRLDVFTQSLENGAAQSGIEVQLLNAKGQTLAQAKSDSQGHVTLQTDKEAALLLARKDGQTTLLDLKLPALDLAEFSIAGAPGFSKQFFMFGPRDLYRPGETVILNALLRDGDGKPLAEQPVKLEVVQPDGQVIRSVMSKPVNGLYQFTYPLDSGAATGMWHIRASTGDNQPREWDFHVEDFMPERMALNLTPQAAPIAPDADVAFSVSGAYLYGAPASGNQLQGKLFLRPLRDAVAALPGFQFGDIAEENLSRSLDEVQLTLDEKGHGEVTTASQWQDSHSPLQVVLQASLLESGGRPVTRTVQQPIWPAEALPGIRPQFTLKDVYDYRTDTTVKQPVVDENSNAAFDIVYADARGEKKAVSGLQVRLIRERRDYYWNWSDSEGWQSQFDQKDLQEGETSLDLQAGQIGKVSFPVEWGSYRLEVKGPDDVVSSVRFWAGYSWQDNSEGTGAARPDRVTMKLDKPGYKPGDTIKLHIAAPAAGKGYAMVESSEGPLWWQEIDVPAEGMDLSIPVDKAWNRHDLYLSTLVVRPGDKSRSATPKRAVGLLHLPLGDENRRLSLALEAPEKMRPNQPLTVKVKASVKEGEVPKQVNVLLSAVDSGVLNITDYATPDPWNAFFGQKRYGADIYDIYGQVIEGQGRLASLRFGGDGDELKRGGKPPVNHVTIVAQQAQPVVLDDRGEGSVTLPIGDFNGELRVMAQAWTADDFGSSEDKVVVAAPVIAELNTPRFLASGDATRLALDLSNLTDKPQTLQVHLTASGLVTLTEGQLPPVQLAPGARSTLFVPVTALAGFGDGQVNATISGLSLPGETFASLQKQWKIGVRPAFPAQTVNSGAVLQPGESWQAPAAQSQGFAPQTLQGQLLLSGKPPLNLARYIRELKAYPYGCLEQTASGLFPSLYTSAAQLKALGISGDSDEKRRAAVDVGISRLLQMQLENGGFALWDKAGPEEYWLTAYAMDFLVRAGEQGYSVPVNAINKGNERLLRYLQEPGLMTVRYSDDAQASRFAAQAYAALVLARQQKAPLGALREIWSRHEQARSGLPLLQLGIALKTMGDAPRGAEAMKLAVTTPRQDENRWLGDYGSQLRDDALKLALLEENKLLPEVQNQLLSSLSEEAFGQRWLSTQETNALFLAGRTLADLPGNWQAQTSLQAEPLASDKAQTRNLDGDRLAALQVTNTGNQPLWLRLDSSGYPQSAPQPGGNVLGIERAIFDTHGQQKSLTSLRSGELVLVKLEVTAKRNVPDALVVDLLPAGLELENQNLANSSASLQENGEAVQNLLNQMQQADIQHIEFRDDRFVAAVAINEGQPVTLVYLARAVTPGTYQVPQPQVESMYVPQWRATGXASGPLTVTP

SEQ ID NO: 6449 - DNA, 1971 bp, Klebsiella aerogenes
  misc_feature (1685)..(1685): n is a, c, g or t
atgaaccactttattatgagcgatagtcgcaaatgcatcggatgcaggggctgcgaagtggcctgcgtgatggcgcataatggcgaacaacatgtcttgaccccacagcgctttttgccgcgtattaccgttattaaaaaccagaaacagcgtaacgcggtaacctgtcgtcactgtgaaggcgcgccctgcgtgcgtagctgccctaatggcgccattagccagcaggatgacagcgtattggtgcatggagaaaaatgtattggctgtaaatcctgcgtggtggcttgcccctttggcgtgatgcaaatcgtcgtcacgccagacggcagggcaacggcgtacaagtgcgacttatgccatgagcgccaagccgggccggcctgcgtgcagaattgtccggcgcaggcattacagctggcgaccgattccatgctaagcgagatggcgaaaacgcggcgcctgcgggcagcgcgtgcggatgcggcgtcgtggcaacatcgtactttgaccgctttagcgtcaacctctggcgataaggccagccagatggcggccacgcccgcgcgcggcgaggcggataaactggcggctgatgtccgtaaacagcactttggcgaaatctatttgcccttcagcgccgaacaggcgcggcgggaaacgcaacgctgtctgaaatgtggcgatcgcagcatctgcgagtggacctgtccgctgcataaccatattccgcagtggatcgagcgggtaaaagccggcgacatcgccagcgccgttgagctttcccatcaaaccaactgtctgccggaaatcaccggccgcgtctgcccgcaggatcgcctgtgcgaaggcgcctgcacgctgcgcgacgagagcggctcggtgactatcggcaacatcgaacgctatatctccgaccaggcgctggccgacggctggcgcccgaacctttcggcggtaaaagccagcggcaagaaggttgccatcatcggcgccgggcctgcgggcctggcctgcgccgaccttctggcgcgtagcggcgtggcgccggtggtgttcgatcgccacccggaaatcggcggcttgctgactttcggtattccgcctttcaagctggataaatcattgctggcccgtcggcgcgagattttcagccaaatgggcatccgctttgaactgaactgcgaggtgggcaaagacatcgaactcgctcaactgcttgcagactatgacgcggttttcgtcggcgccggtacctatcgctcgatgaaagccggtctgcccaatgaggaggcgccgggcgtgtatgaagcgctgccgttccttatcgccaacactaaacaagtgatggggctggaagcgctggtcgatgaaccttatatcgataccgccgggctgaatgttgtcgtgctggggggcggcgatacggcgatggactgcgtgcgtaccgcgctgcgccacggcgcgcaacgggtcacctgcgcctatcgtcgggatgaagctaacatgccggggtcgaaaaaagaggtcaaaaacgcccgcgaagagggggcgaactttgaattcaatgttcagccgatcacccttgagctcggcgagggcggccgggtcagcggcgtgcgttttctgcgtacccggcttggcgaaccggacgcacagggccgccgcagcccgtcgccgatccncggcagcgaatttgtgatgcctgccgatgcggtcattatggcgtttggtttccacccgcattcgatgccgtggctggaagccgcaggggtacagttggacagtcgcgggcggatcaaggcgaacgtggagagccgctatcgttaccagaccagtaatcagaagatctttgccggcggcgacgcggtacgcggcgcggatttggtggtgacggcgatggcggaagggcggcatgccgcgcaggggatcatagactatcttggtgtcgcttccgcactgccgcactaa

SEQ ID NO: 6450 - protein, 656 aa, Klebsiella aerogenes
  misc_feature (562)..(562): Xaa can be any naturally occurring amino acid
MNHFIMSDSRKCIGCRGCEVACVMAHNGEQHVLTPQRFLPRITVIKNQKQRNAVTCRHCEGAPCVRSCPNGAISQQDDSVLVHGEKCIGCKSCVVACPFGVMQIVVTPDGRATAYKCDLCHERQAGPACVQNCPAQALQLATDSMLSEMAKTRRLRAARADAASWQHRTLTALASTSGDKASQMAATPARGEADKLAADVRKQHFGEIYLPFSAEQARRETQRCLKCGDRSICEWTCPLHNHIPQWIERVKAGDIASAVELSHQTNCLPEITGRVCPQDRLCEGACTLRDESGSVTIGNIERYISDQALADGWRPNLSAVKASGKKVAIIGAGPAGLACADLLARSGVAPVVFDRHPEIGGLLTFGIPPFKLDKSLLARRREIFSQMGIRFELNCEVGKDIELAQLLADYDAVFVGAGTYRSMKAGLPNEEAPGVYEALPFLIANTKQVMGLEALVDEPYIDTAGLNVVVLGGGDTAMDCVRTALRHGAQRVTCAYRRDEANMPGSKKEVKNAREEGANFEFNVQPITLELGEGGRVSGVRFLRTRLGEPDAQGRRSPSPIXGSEFVMPADAVIMAFGFHPHSMPWLEAAGVQLDSRGRIKANVESRYRYQTSNQKIFAGGDAVRGADLVVTAMAEGRHAAQGIIDYLGVASALPH

SEQ ID NO: 6451 - DNA, 2016 bp, Klebsiella aerogenes
  misc_feature (743)..(743): n is a, c, g or t
atggaaccaatcgaacaaaaactgactgaactgcgaaccacccttcgccatcatgaatatctgtatcatgttatggacaccccggagattcccgatgcggaatatgaccggctgatgcgcgaactgcgcgaactcgaagcgcaacatcctgagctgattacccctgactcgccgacccaacgcgttggcgcggcgccgttggcctctttcagccagattcgccatgaagtgcccatgctgtcgctggataacgtctttgatgaagagagtttcctcgcctttaacaaacgcgtgcgggaccgtttaagcgatacggcggacctgacctggtgctgtgagctcaagctcgatggcctggcggtcagcatcctctatgaaaacggcgtgctgatgcaggcggcgacccgtggcgatggcaccaccggcgaggatattacctccaacgtgcgaaccattcgcgctattccgctgaagctacgcggcgacaatatcccggcgcggctggaagtgcgcggagaagtgttcctgccgcaggccggatttgaaaaaatcaatgaagaagcgcgccgcaccggcggcaaagtatttgctaacccgcgcaatgccgccgcgggttcgttgcgccagttggatccgcgtattaccgcgaagcgaccgcttactttcttctgctacggcgttggcgtgctggaaggcggtgaactaccggccagccactccgcgcgtttgcagcagtttaagcngtggggattgccggtgagcgaccgcgtgaagctgtgtcattctccagaggaagtgcttacttactatcgccaggttgaagaagaccgtccgaaacttggttttgatattgacggcgtggtgattaaagtcgattcgctggcgctgcaggagcagcttggtttcgtcgcccgcgctccgcgctgggcggtggcctttaaattcccggcccaggagcagatgacttttgtcaacgatgtggaattccaggttggccgtaccggagcgattacgccggtagcgcgccttgaaccggtgcacgtggccggggtactggtcagtaacgccaccctgcataacgccgacgaaatcgaacgtttaggtctgcgtattggcgacaaagtggtgattcgccgcgcgggggacgtgatcccgcaggtcgtcaacgtggtgctttctgaacgcccggaacatacgcgtgaaatcatcttccccacacattgtccggtatgtcattccgatgttgaacgggtggaaggggaagcggtggcgcgctgtaccggcgggcttatctgcggcgcacagcgtaaagaagcgctgaagcactttgtctcccgacgggcgctggatgtcgacggtatgggcgataaaatcatcgatcagctggttgagaaagagtacgtccatacgccagccgatctgttccggctcagcgccggtaagcttaccgggctggatcgcatgggaccgaaatcggcgcaaaatgtggtcaacgcgctggagaaagcgaaagagacgaccttcgcccgcttcctgtatgcgttaggtattcgcgaagtcggtgaggcgacagcagcgggactggcagcgcattttggcactattgaagcgctggaacaggcttcgattgaggagctgcagaaggtgcctgacgtcgggattgtcgtcgccacacatacttttaacttcttcgccgaagagagcaaccgcgaggtcatcgcgcaactgcgcgctgaaggcgttcgctggccggcgccggtggtggtgaaggcggaagaaattgacagtccgtttgctggtaaaaccgtggtattaaccggtagcctgagccagctgtcgcgcgatgatgccaaagcgcggctggtcgcgctgggggcgaaagtcgccggcagcgtgtcgaagaaaaccgatctggtgattgccggcgaagcggcgggctctaagcttgcgaaggcgcaggagttaggcattgaggttatcgacgaagccgaaatgatgcgcctgctgggagaataa

SEQ ID NO: 6452 - protein, 671 aa, Klebsiella aerogenes
  misc_feature (248)..(248): Xaa can be any naturally occurring amino acid
MEPIEQKLTELRTTLRHHEYLYHVMDTPEIPDAEYDRLMRELRELEAQHPELITPDSPTQRVGAAPLASFSQIRHEVPMLSLDNVFDEESFLAFNKRVRDRLSDTADLTWCCELKLDGLAVSILYENGVLMQAATRGDGTTGEDITSNVRTIRAIPLKLRGDNIPARLEVRGEVFLPQAGFEKINEEARRTGGKVFANPRNAAAGSLRQLDPRITAKRPLTFFCYGVGVLEGGELPASHSARLQQFKXWGLPVSDRVKLCHSPEEVLTYYRQVEEDRPKLGFDIDGVVIKVDSLALQEQLGFVARAPRWAVAFKFPAQEQMTFVNDVEFQVGRTGAITPVARLEPVHVAGVLVSNATLHNADEIERLGLRIGDKVVIRRAGDVIPQVVNVVLSERPEHTREIIFPTHCPVCHSDVERVEGEAVARCTGGLICGAQRKEALKHFVSRRALDVDGMGDKIIDQLVEKEYVHTPADLFRLSAGKLTGLDRMGPKSAQNVVNALEKAKETTFARFLYALGIREVGEATAAGLAAHFGTIEALEQASIEELQKVPDVGIVVATHTFNFFAEESNREVIAQLRAEGVRWPAPVVVKAEEIDSPFAGKTVVLTGSLSQLSRDDAKARLVALGAKVAGSVSKKTDLVIAGEAAGSKLAKAQELGIEVIDEAEMMRLLGE

SEQ ID NO: 6453 - DNA, 2634 bp, Klebsiella aerogenes
  misc_feature (259)..(259): n is a, c, g or t
atgagcgaccttgcgagagaaattacaccggtcaacattgaggaagagctgaaaagctcgtatctggattatgcgatgtcggtcattgttggccgtgcgctgccggatgtccgagatggcctgaagccggtacaccgtcgcgtactatacgccatgaacgtattgggcaatgactggaacaaagcctataaaaaatcagcccgtgtcgttggcgacgtaatcggtaaataccacccgcatggtgataccgccgtttatnacaccatcgtacgtatggcgcagccgttctccttgcgttatatgctggtcgatggccagggtaactttggttctgtcgatggcgactccgccgcagcgatgcgttatacggaaatccgtatgtcgaagatcgctcatgagctgatggccgatctcgaaaaagagacggttgatttcgtcgacaactatgacggcacggagaaaatccctgacgtcatgccgacaaaaatccctaacctgctggtgaacggttcttccggtatcgccgtaggtatggcgaccaacattccgccgcataacctgacggaagtcatcaacggctgcctggcatacgttgacaacgaagacatcagcattgaagggctgatggaacacattccgggcccggacttcccgaccgccgctatcattaacggccgtcgcggtattgaagaggcctatcgtaccggtcgcggtaaagtttacattcgcgcgcgcgcggaagtcgaagctgacgcgaaaaccggccgtgaaaccatcatcgtgcacgaaattccgtatcaggtgaacaaagcgcgcctgattgagaaaatcgccgagctggtgaaagaaaaacgcgttgaaggcatcagcgcgctgcgcgacgaatctgacaaagacggtatgcgtatcgttatcgaagtgaaacgcgacgcggtgggtgaagtggttcttaacaacctctactcccagacccaactgcaggtttccttcggtatcaacatggttgcgctgcaccacggtcagccgaagatcatgaacctgaaggacatcattgcggcgtttgttcgtcaccgccgcgaagttgtcactcgtcgtactattttcgaactgcgcaaggcgcgcgaccgtgcgcatatccttgaagcgctggcgattgcgctggctaacatcgatccgatcattgaactgattcgccgcgcgccgacgccggcggaagcaaaggcgggtttaatcgcgcgttcatgggagctgggcaatgtctccgcgatgctggagcgcgccggcgataacgccgcgcgtccggaatggctggagccagagtttggcgtgcgtgatggccagtactatctgaccgaacagcaggctcaggcgattctggatctgcgtctgcagaaactgaccggtctggagcatgaaaaactgctcgacgagtacaaagagctgctggatcagatcgccgagctgctgcacatcctgggcagcgccgatcgtctgatggaagttattcgcgaagagctggagctggttaaagaacagtttggcgatgcacgtcgtaccgaaatcaccgccaacagcgctgatatcaatatcgaagacctgattaaccaggaagatgttgtcgtgaccctgtcgcaccagggctatgtgaaatatcaaccgttaaccgactacgaagcgcagcgtcgtggcggtaaaggtaaatcggcagcgcgtattaaagaagaagactttatcgaccgtctgctggtggccaacacccatgacacgatcctctgcttctccagccgtggtcgcctgtactggatgaaagtgtatcagttgccggaagccagccgcggcgcgcgtggtcgaccaatcgtcaacctgctgccgctggaagctgacgagcgtatcaccgctatcctgccggttcgcgagtacgaagagggcgttaacgtctttatggcgaccgccagcggtaccgtgaagaaaacggcattgaccgagttcagccgtccacgttctgccggtatcatcgccgtcaatctgaacgaaggcgacgaactgatcggcgtcgatctgacttctggccaggacgaagtgatgctgttctccgccgctggtaaagtggtgcgctttaaagaagacgccgttcgcgcgatgggccgtaccgcaaccggcgtacgcggtatcaagctggcgggcgaagatagcgtcgtgtcgctgattattcctcgtggcgaaggggcgatcctgaccgtgacgcaaaacggttacggcaagcgtaccgcggccgaagagtatccgaccaagtcgcgtgcgacgcagggcgttatctctattaaggtcaccgaacgtaacggttccgtggtcggcgccgtgcaggtcgatgattgcgaccagatcatgatgattaccgatgcgggcaccctggtgcgtactcgcgtttctgaagtgagcatcgtgggtcgtaatactcagggcgtgattctgatccgtaccgcggaagatgaaaacgttgtcggcctgcagcgcgtggctgaaccggttgacgacgaagaactggatgccatcgatggcagcgtagcggaaggcgatgatgatatcgcgccggaaaacgacgctgacgacgacatcgccgaagacgaagagtaa

SEQ ID NO: 6454 - protein, 877 aa, Klebsiella aerogenes
  misc_feature (87)..(87): Xaa can be any naturally occurring amino acid
MSDLAREITPVNIEEELKSSYLDYAMSVIVGRALPDVRDGLKPVHRRVLYAMNVLGNDWNKAYKKSARVVGDVIGKYHPHGDTAVYXTIVRMAQPFSLRYMLVDGQGNFGSVDGDSAAAMRYTEIRMSKIAHELMADLEKETVDFVDNYDGTEKIPDVMPTKIPNLLVNGSSGIAVGMATNIPPHNLTEVINGCLAYVDNEDISIEGLMEHIPGPDFPTAAIINGRRGIEEAYRTGRGKVYIRARAEVEADAKTGRETIIVHEIPYQVNKARLIEKIAELVKEKRVEGISALRDESDKDGMRIVIEVKRDAVGEVVLNNLYSQTQLQVSFGINMVALHHGQPKIMNLKDIIAAFVRHRREVVTRRTIFELRKARDRAHILEALAIALANIDPIIELIRRAPTPAEAKAGLIARSWELGNVSAMLERAGDNAARPEWLEPEFGVRDGQYYLTEQQAQAILDLRLQKLTGLEHEKLLDEYKELLDQIAELLHILGSADRLMEVIREELELVKEQFGDARRTEITANSADINIEDLINQEDVVVTLSHQGYVKYQPLTDYEAQRRGGKGKSAARIKEEDFIDRLLVANTHDTILCFSSRGRLYWMKVYQLPEASRGARGRPIVNLLPLEADERITAILPVREYEEGVNVFMATASGTVKKTALTEFSRPRSAGIIAVNLNEGDELIGVDLTSGQDEVMLFSAAGKVVRFKEDAVRAMGRTATGVRGIKLAGEDSVVSLIIPRGEGAILTVTQNGYGKRTAAEEYPTKSRATQGVISIKVTERNGSVVGAVQVDDCDQIMMITDAGTLVRTRVSEVSIVGRNTQGVILIRTAEDENVVGLQRVAEPVDDEELDAIDGSVAEGDDDIAPENDADDDIAEDEE

SEQ ID NO: 6455 - DNA, 2634 bp, Klebsiella aerogenes
  misc_feature (248)..(248): n is a, c, g or t
atgagcgaccttgcgagagaaattacaccggtcaacattgaggaagagctgaaaagctcgtatctggattatgcgatgtcggtcattgttggccgtgcgctgccggatgtccgagatggcctgaagccggtacaccgtcgcgtactatacgccatgaacgtattgggcaatgactggaacaaagcctataaaaaatcagcccgtgtcgttggcgacgtaatcggtaaataccacccgcatggtgatancgccgtttatgacaccatcgtacgtatggcgcagccgttctccttgcgttatatgctggtcgatggccagggtaactttggttctgtcgatggcgactccgccgcagcgatgcgttatacggaaatccgtatgtcgaagatcgctcatgagctgatggccgatctcgaaaaagagacggttgatttcgtcgacaactatgacggcacggagaaaatccctgacgtcatgccgacaaaaatccctaacctgctggtgaacggttcttccggtatcgccgtaggtatggcgaccaacattccgccgcataacctgacggaagtcatcaacggctgcctggcatacgttgacaacgaagacatcagcattgaagggctgatggaacacattccgggcccggacttcccgaccgccgctatcattaacggccgtcgcggtattgaagaggcctatcgtaccggtcgcggtaaagtttacattcgcgcgcgcgcggaagtcgaagctgacgcgaaaaccggccgtgaaaccatcatcgtgcacgaaattccgtatcaggtgaacaaagcgcgcctgattgagaaaatcgccgagctggtgaaagaaaaacgcgttgaaggcatcagcgcgctgcgcgacgaatctgacaaagacggtatgcgtatcgttatcgaagtgaaacgcgacgcggtgggtgaagtggttcttaacaacctctactcccagacccaactgcaggtttccttcggtatcaacatggttgcgctgcaccacggtcagccgaagatcatgaacctgaaggacatcattgcggcgtttgttcgtcaccgccgcgaagttgtcactcgtcgtactattttcgaactgcgcaaggcgcgcgaccgtgcgcatatccttgaagcgctggcgattgcgctggctaacatcgatccgatcattgaactgattcgccgcgcgccgacgccggcggaagcaaaggcgggtttaatcgcgcgttcatgggagctgggcaatgtctccgcgatgctggagcgcgccggcgataacgccgcgcgtccggaatggctggagccagagtttggcgtgcgtgatggccagtactatctgaccgaacagcaggctcaggcgattctggatctgcgtctgcagaaactgaccggtctggagcatgaaaaactgctcgacgagtacaaagagctgctggatcagatcgccgagctgctgcacatcctgggcagcgccgatcgtctgatggaagttattcgcgaagagctggagctggttaaagaacagtttggcgatgcacgtcgtaccgaaatcaccgccaacagcgctgatatcaatatcgaagacctgattaaccaggaagatgttgtcgtgaccctgtcgcaccagggctatgtgaaatatcaaccgttaaccgactacgaagcgcagcgtcgtggcggtaaaggtaaatcggcagcgcgtattaaagaagaagactttatcgaccgtctgctggtggccaacacccatgacacgatcctctgcttctccagccgtggtcgcctgtactggatgaaagtgtatcagttgccggaagccagccgcggcgcgcgtggtcgaccaatcgtcaacctgctgccgctggaagctgacgagcgtatcaccgctatcctgccggttcgcgagtacgaagagggcgttaacgtctttatggcgaccgccagcggtaccgtgaagaaaacggcattgaccgagttcagccgtccacgttctgccggtatcatcgccgtcaatctgaacgaaggcgacgaactgatcggcgtcgatctgacttctggccaggacgaagtgatgctgttctccgccgctggtaaagtggtgcgctttaaagaagacgccgttcgcgcgatgggccgtaccgcaaccggcgtacgcggtatcaagctggcgggcgaagatagcgtcgtgtcgctgattattcctcgtggcgaaggggcgatcctgaccgtgacgcaaaacggttacggcaagcgtaccgcggccgaagagtatccgaccaagtcgcgtgcgacgcagggcgttatctctattaaggtcaccgaacgtaacggttccgtggtcggcgccgtgcaggtcgatgattgcgaccagatcatgatgattaccgatgcgggcaccctggtgcgtactcgcgtttctgaagtgagcatcgtgggtcgtaatactcagggcgtgattctgatccgtaccgcggaagatgaaaacgttgtcggcctgcagcgcgtggctgaaccggttgacgacgaagaactggatgccatcgatggcagcgtagcggaaggcgatgatgatatcgcgccggaaaacgacgctgacgacgacatcgccgaagacgaagagtaa

SEQ ID NO: 6456 - protein, 877 aa, Klebsiella aerogenes
  misc_feature (83)..(83): Xaa can be any naturally occurring amino acid
MSDLAREITPVNIEEELKSSYLDYAMSVIVGRALPDVRDGLKPVHRRVLYAMNVLGNDWNKAYKKSARVVGDVIGKYHPHGDXAVYDTIVRMAQPFSLRYMLVDGQGNFGSVDGDSAAAMRYTEIRMSKIAHELMADLEKETVDFVDNYDGTEKIPDVMPTKIPNLLVNGSSGIAVGMATNIPPHNLTEVINGCLAYVDNEDISIEGLMEHIPGPDFPTAAIINGRRGIEEAYRTGRGKVYIRARAEVEADAKTGRETIIVHEIPYQVNKARLIEKIAELVKEKRVEGISALRDESDKDGMRIVIEVKRDAVGEVVLNNLYSQTQLQVSFGINMVALHHGQPKIMNLKDIIAAFVRHRREVVTRRTIFELRKARDRAHILEALAIALANIDPIIELIRRAPTPAEAKAGLIARSWELGNVSAMLERAGDNAARPEWLEPEFGVRDGQYYLTEQQAQAILDLRLQKLTGLEHEKLLDEYKELLDQIAELLHILGSADRLMEVIREELELVKEQFGDARRTEITANSADINIEDLINQEDVVVTLSHQGYVKYQPLTDYEAQRRGGKGKSAARIKEEDFIDRLLVANTHDTILCFSSRGRLYWMKVYQLPEASRGARGRPIVNLLPLEADERITAILPVREYEEGVNVFMATASGTVKKTALTEFSRPRSAGIIAVNLNEGDELIGVDLTSGQDEVMLFSAAGKVVRFKEDAVRAMGRTATGVRGIKLAGEDSVVSLIIPRGEGAILTVTQNGYGKRTAAEEYPTKSRATQGVISIKVTERNGSVVGAVQVDDCDQIMMITDAGTLVRTRVSEVSIVGRNTQGVILIRTAEDENVVGLQRVAEPVDDEELDAIDGSVAEGDDDIAPENDADDDIAEDEE

SEQ ID NO: 6457 - DNA, 1563 bp, Klebsiella aerogenes
  misc_feature (377)..(377): n is a, c, g or t
atgctaacccgctacttttcaccccgacgtaaaatctggcttaccagtatttgtatcggcgttgccgtcgcgctactggccggcagcatccagtttatggttatctaccacaaccgctctgagcgtttcgatcagataatcaataacgtcagccactaccttaatagctatttcgctgatttaagcaaaaccattgatggcctgcagccgctgctcgatcagccctgcgaacatattgactccggcctcgccgccagcgccgcctttagtcccaacgtgcgcgccttcctgctggtgaaaaacggcaaagcgttctgctcatccgccaccggcgcaatggacacaccgtttaaacaattgataccgcagcttgatancaataaacctctggatatggccatcctccagggcacgccgatgatgccgaacaccgccgcgctggcaatgtgggtacaacgtcccggcgatcgagacagcggcatttttgtatccatcaatgccaatctgacgccttatatcctctataccgcacgacagaatgatttcagcggcattgcgctggccatcggccatacggcaatttcgaccttcagcagcaaaattatcgacccgctatcattgcccaatgagccgatacgccagattcaggttccggggctaccgctaaaagtgtatctcttttccaacagctggcttggcgagaatacccagttcgccctgttgctcggcgtggtatgcggcatgcttgccggcttgctcagctactacatcctgacgatcaaatccgatccgcggaaatcgatccaactggggatcaaaaacaaccagttctacgtggtctaccagccggtggtaaaggccgataccctgcagattagcggcgttgaagtgctgatgcgctggcggcatccggtggtaggtgaaatcccgcctgacgtctttattaatctggcggagacgcagcagatgatcgtgccgcttacccatcacctgttaatgttgattgcccgcgacgcgccgactctgcagcgcattttgccgcgcggtaccaagctcggtctgaatatctcgcctgcccacctgcatgccgccggatttcagcaagatatgcaacgttttgccgccgcgttacccgcaaactacttcgacgtcgtgctggagataaccgaacgttcgatgatcgataaaaaccagtcgatggccatttttgagtggctccatcagcagggcttcgaaattgctatcgatgattttggtaccggccatagcgcgctgatttatctggagcgctataactttgattatctgaagatcgatcgtggttttgtgcaggcgatcggtaccgaaaccgtcacctctcccgtcctggatgcggtgctaacgctaagccgccgtctacagttgaaaaccgtggctgaaggcgtagaaacgccggagcaggcggaatggctgcgtgctcacggcgtgaagtatctgcaaggttactgcttcagccgcccgctgccgctggataaactggtcgccgcccatgatgaaccggcaaattatttcacaagccgctga

SEQ ID NO: 6458 - protein, 520 aa, Klebsiella aerogenes
  misc_feature (126)..(126): Xaa can be any naturally occurring amino acid
MLTRYFSPRRKIWLTSICIGVAVALLAGSIQFMVIYHNRSERFDQIINNVSHYLNSYFADLSKTIDGLQPLLDQPCEHIDSGLAASAAFSPNVRAFLLVKNGKAFCSSATGAMDTPFKQLIPQLDXNKPLDMAILQGTPMMPNTAALAMWVQRPGDRDSGIFVSINANLTPYILYTARQNDFSGIALAIGHTAISTFSSKIIDPLSLPNEPIRQIQVPGLPLKVYLFSNSWLGENTQFALLLGVVCGMLAGLLSYYILTIKSDPRKSIQLGIKNNQFYVVYQPVVKADTLQISGVEVLMRWRHPVVGEIPPDVFINLAETQQMIVPLTHHLLMLIARDAPTLQRILPRGTKLGLNISPAHLHAAGFQQDMQRFAAALPANYFDVVLEITERSMIDKNQSMAIFEWLHQQGFEIAIDDFGTGHSALIYLERYNFDYLKIDRGFVQAIGTETVTSPVLDAVLTLSRRLQLKTVAEGVETPEQAEWLRAHGVKYLQGYCFSRPLPLDKLVAAHDEPANYFTSR

SEQ ID NO: 6459 - DNA, 666 bp, Enterobacter cloacae
  misc_feature (114)..(114): n is a, c, g or t
atggctttccgtgaccaacctttgggcgagctggcgctgagcatcccgcgcgcctccgcgctgttccgtaaatacgatatggattactgctgcggcggcaaacaaaccctggancgcgcggcgacgcgcaaagcgctggatgttgcggtgattgaagccgagctggcgaaactggccgagcagccggtcgagcgcgactggcgcgccgcgccgttcgccgacatcatcgaccacatcatcgttcgctatcatgatcgccaccgcgaacagctgccggaactgatcctgcaggcaaccaaggttgaacgcgtccacgccgataagccgaacgtaccaaaaggactaaccaaatatctgaccatgctgcaccaggaactctccagccacatgatgaaagaggagcagatcctgttcccgatgatcaagcagggcatgggcgctcaggccggtggtcctatcagcgtaatggaaagcgagcatgacgaagcgggcgaactgctggaagtgatcaagcacatcacccataacgtgacgccgccgccggaagcctgtactacctggaaagcgatgtacaacggcattaacgagatgattgacgacctgatggagcacatcagtctggaaaataacgtgctgttcccgcgtgccctcgccggaaaatcataa

SEQ ID NO: 6460 - protein, 221 aa, Enterobacter cloacae
  misc_feature (38)..(38): Xaa can be any naturally occurring amino acid
MAFRDQPLGELALSIPRASALFRKYDMDYCCGGKQTLXRAATRKALDVAVIEAELAKLAEQPVERDWRAAPFADIIDHIIVRYHDRHREQLPELILQATKVERVHADKPNVPKGLTKYLTMLHQELSSHMMKEEQILFPMIKQGMGAQAGGPISVMESEHDEAGELLEVIKHITHNVTPPPEACTTWKAMYNGINEMIDDLMEHISLENNVLFPRALAGKS

SEQ ID NO: 6461 - DNA, 660 bp, Klebsiella aerogenes
  misc_feature (618)..(618): n is a, c, g or t
atgtaccaacatcataactggcagggtgagttactggattatccagtgagcaaagtggtttgcgttggcagtaattacgcaaaacatattaaggagatgggcagcgcgatgccggaagaaccggtgctgtttattaaacctgaaacggcgctatgcgatatccgccagccgttggtacttcctgaaggattgggatcggtgcaccatgaggttgaactggcggtgctgatcggcagcaccttgcgccaggccagcgaagaccacgtgcgtaaggcgattgctggttatggcgtggcgctggatctcaccctgcgtgatattcagggcaagatgaaaaaggccgggcaaccgtgggagaaagctaaggggttcgataacgcctgtccaatctccggttttattcctgccgccgagttcaacggcgatccgcaaaatatgccgctaagcctgaagattaatggtgaagttcgccagcaggggacgactgcggatatgattcataagatcgtaccgctaattgcctatatgtcgcgcttctttacgctgaaagcgggcgatatcattctgaccgggaccccggagggggtcgggccgctcgccagcggcgatgagctggangtcggcttcaatggtttgacgttatccacccgcgtgctgtaa

SEQ ID NO: 6462 - protein, 219 aa, Klebsiella aerogenes
  misc_feature (206)..(206): Xaa can be any naturally occurring amino acid
MYQHHNWQGELLDYPVSKVVCVGSNYAKHIKEMGSAMPEEPVLFIKPETALCDIRQPLVLPEGLGSVHHEVELAVLIGSTLRQASEDHVRKAIAGYGVALDLTLRDIQGKMKKAGQPWEKAKGFDNACPISGFIPAAEFNGDPQNMPLSLKINGEVRQQGTTADMIHKIVPLIAYMSRFFTLKAGDIILTGTPEGVGPLASGDELXVGFNGLTLSTRVL

SEQ ID NO: 6463 - DNA, 2295 bp, Klebsiella aerogenes
  misc_feature (1948)..(1948): n is a, c, g or t
atgaaggtaaatatcgataccagcgatatgctgtacgccgaagcatggcacggatttaacggtacggactggaaagaagaaattaatgtccgtgactttattcagcacaactatacgccatataccggggatgaatcgttcctcgcacaggcgacgccggcgacgaccgcgctgtgggaaaaagtgatggccggcattcgcgtagagaacgccacccacgcgccggttgattttgataccaatatcgccaccaccattaccgctcacgatgccggctatatcgaccaggcgctggagaaaattgtcggtctgcaaacggataaaccgctcaagcgcgcgctacatccgtttggcggcattaacatgattaaaagctcgtttgatgcctatggccgggaaatggatagccagtttgaatatctgtttagcgagctgcgtaaaacccacaatcagggggtatttgacgcctattcgcccgatatgctgcgctgccgtaaatccggcgtgttgactggcctgccggacggctatggccgcgggcgtattattggcgactaccgccgcgtggcgctatacggcattcgctacctggtgcgggaacgtgagctacagtttgccgatctgcaggcaacgctcgagcgcgggcaggatctggaagccactattcgtctgcgtgaagagctggcggagcaccgccgcgcgctgctgcaaatgcaggagatggcggcgaaatatggctgtgatatctcccgcccggcgcgcaacgcccaggaagcggtacagtggttgtacttcgcctatctggcggcggtgaaatcgcaaaacggcggcgcgatgtcgctggggcgcaccgcctctttcctcgatatctatatcgagcgcgacttccacgccgggatcctcaatgaacaacaggcccaggagctgatcgaccacttcattatgaagatccgcatggtgcgtttcctgcgtacgccggaattcgacacgctgttctccggcgatcccatctgggcaaccgaagtgattggcgggatggggctggatggccgcacgctggtgactaaaaactctttccgctatctgcatacgctgcacaccatgggcccggcgccggaacctaaccttaccgtattgtggtctgaagcgctgccgattgcctttaagaaatacgccgcccaggtctcgatcgtcacttcctcgctacagtatgaaaacgatgacctgatgcgcgccgatttcaacagtgatgattacgccattgcctgctgcgtcagcccgatggtcatcggcaaacagatgcagttcttcggcgcgcgcgccaacctcgccaaaacgctgctgtacgcaatcaatggcggggtggatgagaaactcaaaatccaggtcgggccgaaaaccgcaccgctgatggacgacgtgctggattacgacaaagtgatggccagcctcgatcattttatggattggctggcggtgcagtacatcagcgcgctgaacatcattcattacatgcatgataaatacagttatgaagcctcgctgatggcgctgcacgaccgcgatgtataccgcaccatggcctgcgggattgccggtctgtcggtggcggcggattcgctttcggctattaagcacgcgaaggtgaaacccatccgtgacgacagcggcctggcgatcgattttgagattgaaggcgattatccgcagtatggcaataacgatcggcgcgttgatagtatcgcctgcgatctcgttgaacgtttcatgaagaaaattaaggtgttgccgacctaccgtaacgcggtgccgacgcagtcgattctgacgattacctcaaacgtggtgtacggtcagaaaactggtaataccccggatggccgccgcgccggtacgccgtttgcgccgggggcaaatccaatgcatggccgcgatcgtaaaggggcgntcgcttcgttgacttccgtggctaagttgccgttcgcctacgcgaaggacgggatctcttataccttctcgattgtcccggcggcgttaggcaaagaggcgagcgtccggcaaaccaacctcgtcggtctgcttgatggctacttccaccacgaagaacgaatcgagggcggccagcatctgaacgtcaacgtgatgaaccgcgagatgctactggacgccatagctcatccggaaaattatccgaacctgaccatccgcgtctctggctatgcggtgcgctttaatgcgctgacccatgaacagcagcaggatgtcatttcgcgaaccttcacccaggcgctgtaa

SEQ ID NO: 6464 - protein, 764 aa, Klebsiella aerogenes
  misc_feature (650)..(650): Xaa can be any naturally occurring amino acid
MKVNIDTSDMLYAEAWHGFNGTDWKEEINVRDFIQHNYTPYTGDESFLAQATPATTALWEKVMAGIRVENATHAPVDFDTNIATTITAHDAGYIDQALEKIVGLQTDKPLKRALHPFGGINMIKSSFDAYGREMDSQFEYLFSELRKTHNQGVFDAYSPDMLRCRKSGVLTGLPDGYGRGRIIGDYRRVALYGIRYLVRERELQFADLQATLERGQDLEATIRLREELAEHRRALLQMQEMAAKYGCDISRPARNAQEAVQWLYFAYLAAVKSQNGGAMSLGRTASFLDIYIERDFHAGILNEQQAQELIDHFIMKIRMVRFLRTPEFDTLFSGDPIWATEVIGGMGLDGRTLVTKNSFRYLHTLHTMGPAPEPNLTVLWSEALPIAFKKYAAQVSIVTSSLQYENDDLMRADFNSDDYAIACCVSPMVIGKQMQFFGARANLAKTLLYAINGGVDEKLKIQVGPKTAPLMDDVLDYDKVMASLDHFMDWLAVQYISALNIIHYMHDKYSYEASLMALHDRDVYRTMACGIAGLSVAADSLSAIKHAKVKPIRDDSGLAIDFEIEGDYPQYGNNDRRVDSIACDLVERFMKKIKVLPTYRNAVPTQSILTITSNVVYGQKTGNTPDGRRAGTPFAPGANPMHGRDRKGAXASLTSVAKLPFAYAKDGISYTFSIVPAALGKEASVRQTNLVGLLDGYFHHEERIEGGQHLNVNVMNREMLLDAIAHPENYPNLTIRVSGYAVRFNALTHEQQQDVISRTFTQAL

SEQ ID NO: 6465 - DNA, 687 bp, Klebsiella aerogenes
  misc_feature (488)..(488): n is a, c, g or t
atgtccaccgtcattgatacctttatcgccccaccttgttccgcgcagattaagatcctctacgaggacgcgcatttgttgttgatcgacaaacccagcggcctgctcagcctgtcgggcaagaacccgcagaaccaggattcagttcatcatcgcctggtgcaggattttcctgggtgcacgctggtacatcggctcgatttcgggacgtccgggctgatggtggtcgcgcgtaacaaaacgatcaacgccgcgctgtgtcagcagttcagccagcgggcggtaagcaaggtctatcacgccctgttgtgcgggcatcctgcggaagatgaaggggtgatagacgcgccgattgctaaagatccggagctgtttccgcgcatggcgattagcgtgcgtaatggtaaaccggcgcgctcgcgctatcaggtgctatcacgggaatggttgccaatagccggtggttcgctggcggtaacgcgcgtgcngctgctgccggaaaccggacgcacccatcagctacgcatccactgccagcatctcggctatccgattctcggctgcgatctctacggagggctggtggagcatcaggcctcacgcctgatgctccacgccagtgaactgcattttcatcatccggtcagcggtaaagcgatagcggcgcgccagcccagtcctttttga

SEQ ID NO: 6466 - protein, 228 aa, Klebsiella aerogenes
  misc_feature (163)..(163): Xaa can be any naturally occurring amino acid
MSTVIDTFIAPPCSAQIKILYEDAHLLLIDKPSGLLSLSGKNPQNQDSVHHRLVQDFPGCTLVHRLDFGTSGLMVVARNKTINAALCQQFSQRAVSKVYHALLCGHPAEDEGVIDAPIAKDPELFPRMAISVRNGKPARSRYQVLSREWLPIAGGSLAVTRVXLLPETGRTHQLRIHCQHLGYPILGCDLYGGLVEHQASRLMLHASELHFHHPVSGKAIAARQPSPF

SEQ ID NO: 6467 - DNA, 1683 bp, Enterobacter cloacae
  misc_feature (470)..(470): n is a, c, g or t
atgagcgcgggctatccgcgcctgctatggctgtggggcgggctgctggcggtgttgatgatcctgctgtttctgccgttatccaccggcggccgggtgctggctgttgggctgacggcggcgggcgtagcggccgggctggtctacatcgggcgccaacaacgtgagcggcctgcggatgccgactggctggttgagctaccgccggcgccgtatcgactgccgattgtgctggtctgcggcgacacggcggactggccgggagaaggagcggtttaccgtacggctcaggggtgctggctgagagtcgccaccgccgcgctgcagcagacggtgcgttatgtgcgcaatgagcgcccggcgctcattgcgcaactggcggtgatgttctgcatgcagccgcaacaacatgatgatgacgcggcgctggcggcgcggctacgcgagttgcgctggcagcttgcccaggngcggggcgatacccgtcgggagataccgttactgctgaacagctctctatccggcgcatcgctggaaccgttatggcagacagcgcgtgccggagagacgttgcaggtgtggctgcctgacggcgtgccgtgcagcagcgcaagctggttgatgcaggctgatggcgctcatcgcctggcggcgcagctaaggataaatgcgcttgcccgctttacgcagcagatggcgttaagcgtactgacggcggccaccgacgatgttcccccgatcgctccggcggtcgtactgtatcatttcacgccagccggggcgcctgccatggcggataatctatggcagcgttggctgtctgagcatacttccctcaactcactaccgggctggttaccggaaattgctgcagaaacgcggaaactgccggatttcattttaccgatactggcgcagggcggcggcatcacgccgaaaagccgtgctctacggcgggcattctgtctgttctccctcgcggccctgattgcgctgtgctgcagcgcatggaacaaccagcaactcctccagcgggttggctttgatgttcagcgctatgaacggacggcgatggacgaccatgtcgcaaaagcccgcgccgtacagattttgcgtcaggatgcggcgcaactggacgccttcgcgcgtgatggcgcgccgctggcgctgggccttgggctctatcgcggcgagcgtctgcgtcagccggtactggcagcaattcgttcctacgtccctccacctccgccgccgaaagcggtagaaaaaatcgtaccgaaaattgtccgtctcgacagcatgtcgctattcgacaccggcaagtggacgcttaaaccggggtccaccaagctgctggtgaactcgctggtggggatcaaagccaggcccggttggctaatcgtcatcgccggacataccgacagcgtaggcgatgataaatccaaccagacactctccctgaagcgtgccgaatcggtgcgtaactggatgcgcgataccggcgacgtgccggaaagctgttttgcggtgcagggttatggcgaaagccgtccggtcgctagcaacgatgcgcagcaaggccgggcgctgaaccgccgggtcgaaattagcctggtgccgcagcccgacgcctgtcaggtttcgacgaactccgcttcaactccggcggatggcgctttctaa

SEQ ID NO: 6468 - protein, 560 aa, Enterobacter cloacae
  misc_feature (157)..(157): Xaa can be any naturally occurring amino acid
MSAGYPRLLWLWGGLLAVLMILLFLPLSTGGRVLAVGLTAAGVAAGLVYIGRQQRERPADADWLVELPPAPYRLPIVLVCGDTADWPGEGAVYRTAQGCWLRVATAALQQTVRYVRNERPALIAQLAVMFCMQPQQHDDDAALAARLRELRWQLAQXRGDTRREIPLLLNSSLSGASLEPLWQTARAGETLQVWLPDGVPCSSASWLMQADGAHRLAAQLRINALARFTQQMALSVLTAATDDVPPIAPAVVLYHFTPAGAPAMADNLWQRWLSEHTSLNSLPGWLPEIAAETRKLPDFILPILAQGGGITPKSRALRRAFCLFSLAALIALCCSAWNNQQLLQRVGFDVQRYERTAMDDHVAKARAVQILRQDAAQLDAFARDGAPLALGLGLYRGERLRQPVLAAIRSYVPPPPPPKAVEKIVPKIVRLDSMSLFDTGKWTLKPGSTKLLVNSLVGIKARPGWLIVIAGHTDSVGDDKSNQTLSLKRAESVRNWMRDTGDVPESCFAVQGYGESRPVASNDAQQGRALNRRVEISLVPQPDACQVSTNSASTPADGAF

SEQ ID NO: 6469 - DNA, 2229 bp, Enterobacter cloacae
  misc_feature (2054)..(2054): n is a, c, g or t
atgaacggggtgcaaatccgcatacgcggcaaagtgcagggggtgggtttccgcccctttgtctggcaactggcgcggcaaatggcgcgcggcggcgatgtctgtaacgacggcgacggcgtgctggtcagactgaccggcgacgacggtggcttttctgccgcgttggctcgtcactgcccgccgctggcgcgcattgacagcaccgactgcaccccgtttcactggcacaggcttcctcaggatttcaccattcgccacagcgacggcggcagtatgcgcacgcagattgttcccgatgccgcaacctgcccggcgtgcctggcggagatgaacgatccgcaagaacgccgctaccgctacccctttatcaactgtacccactgcgggccgcgcttcaccattattcgcgccatgccatacgatcgcccctttaccgcgatggcgccgttcccgctgtgtccgcgctgcgctgccgagtatcggcagcctgccgatcgccgttttcacgcccagccggtggcttgtgccgattgcggcccacagctggagtggcgggcgggaacgctaacgctattcgctgaagcggccctgcaggcggccatcgcgcggctggcggcgggcgatattgtggcgataaaagggattggcggttttcatctggcctgcgatgccggcaatagcgaggcggtggcagcgctgcgcgcgcgtaaacggcgcccggcaaaaccgctggcggtaatgctgccgacggcaacggggttacccgccgcggcggcaacgctgctgcgctcgcccgccgcgccgattgtattgctggctaaagcgcaggttcccggcctgtgtgacgagattgcgtcagggcttgcggaagtcggggtgatgctgccgtctaatccgctgcagcatttacttctgcaggcgctggcgcgcccgatagtgatgacctccggcaacctcagcggccgccctccggcattgagtaatcacgaagcgctcaccgacttagccgctatcgccgacggttttctgctacataatcgcgatatcgtgcagcgtatggacgattcgctggtgcgctcaagcggtgagatgctgcgccgcgcccgaggctacgtgccggatgcgctgccgctgccgccgggcctggataatattccgccgctgctggcgctgggggcggatatgaaaaataccttctgtctggcgcgcggcgacgaggcggtgctgagccagcattttggcgatctcggcgaggagggcgtcgagcaacagtggcgcagtgcgctgcggttaatgcagagcatttatgcgtttgcgccgcagcgggtggcggttgacgcccatcccggctatcgctcaacgcggtgggcggcgtcaatgtcgttaccggtcgagccggtactgcatcaccatgcccacgcggcggcttgcctggcggaacaccgctggccgctcgacggcggcgatgtgattgccctgacccttgatggcatcgggatgggggaaaacggcgcgctgtggggcggcgaatgcctgcgggtgaactaccgcgaatgcgaacatcttggcggcctcccggccgtcgcgctgccgggcggcgatctggcggcgcgccagccgtggcgaaatttgttggcccagtgcctggcatttattcccgactggcagtcatacccgcaaaccgccgcgctggggcagcgaaactggccgctgttggcgcaggccatcgaacgcggcattaattcgccgcgcgcctcttcctgcggacggctgtttgatgccgtcgcctgcgcgctggattgcgcgccggaaaccctgagctacgaaggcgaggcggcctgtcggctggaggcgctggccgccagctgtccgggcgtcagccatccgatcacgctgccctggcgcggcggcgagctggatttagccaccttctggcgacagtggttgcgctggcaggcgacgcccgcgcagaaagcctgggcctttcatgatgcgctggcctgcgggctggcggcgctggcgcgcgaccgcgccgcttcctgcgggatcgngacgatcgtttgtagcggcggcgtactgcataatcagctgctcgccgcccgcctcagcgattacctctcggattttactttgcttttgccgcagcagcttcctgctggcgatggcgctatcgcctacggtcaggcggtggtggccgccgcccgctggcagtctcaaaggatttaa

SEQ ID NO: 6470 - protein, 742 aa, Enterobacter cloacae
  misc_feature (685)..(685): Xaa can be any naturally occurring amino acid
MNGVQIRIRGKVQGVGFRPFVWQLARQMARGGDVCNDGDGVLVRLTGDDGGFSAALARHCPPLARIDSTDCTPFHWHRLPQDFTIRHSDGGSMRTQIVPDAATCPACLAEMNDPQERRYRYPFINCTHCGPRFTIIRAMPYDRPFTAMAPFPLCPRCAAEYRQPADRRFHAQPVACADCGPQLEWRAGTLTLFAEAALQAAIARLAAGDIVAIKGIGGFHLACDAGNSEAVAALRARKRRPAKPLAVMLPTATGLPAAAATLLRSPAAPIVLLAKAQVPGLCDEIASGLAEVGVMLPSNPLQHLLLQALARPIVMTSGNLSGRPPALSNHEALTDLAAIADGFLLHNRDIVQRMDDSLVRSSGEMLRRARGYVPDALPLPPGLDNIPPLLALGADMKNTFCLARGDEAVLSQHFGDLGEEGVEQQWRSALRLMQSIYAFAPQRVAVDAHPGYRSTRWAASMSLPVEPVLHHHAHAAACLAEHRWPLDGGDVIALTLDGIGMGENGALWGGECLRVNYRECEHLGGLPAVALPGGDLAARQPWRNLLAQCLAFIPDWQSYPQTAALGQRNWPLLAQAIERGINSPRASSCGRLFDAVACALDCAPETLSYEGEAACRLEALAASCPGVSHPITLPWRGGELDLATFWRQWLRWQATPAQKAWAFHDALACGLAALARDRAASCGIXTIVCSGGVLHNQLLAARLSDYLSDFTLLLPQQLPAGDGAIAYGQAVVAAARWQSQRI

SEQ ID NO: 6471 - DNA, 1020 bp, Klebsiella aerogenes
  misc_feature (85)..(85): n is a, c, g or t
atgaagagcattgttatccaacagccaaacgcgctggcgattgaagaacggccgctgccgcagccgggaaatggagaagtgcggntaaaggtgaaactggcgggaatttgcggctcagatagccacatctatcgtggacataacccgttcgccaaatatccccgggtcatcggccacgagtttttcggcgtgattgatgccgtgggcgagggggtgacggataaagtcgtgggccagcgggtgacggttgatccggttatcagctgcggccactgttatccctgttcggtcggtaagcccaacgtctgcgcttcgctggtggtgctgggcgtccatcgcgatggcggttttagcgaatacgcggtggtgccggccaaaaatgcctggccggtgccggagaacgtgagcgaccatcatgcggtaatggttgagccctttaccattgcggcgaatgtcaccgggcaggctaaaccacgcgaacaggatatcgcgctggtctacggcgccgggccgatggggctgaccaccattcaggtgctcaagcgcgtctataacgtgcggcaggtcatcgttgccgatcagatccccgagcggctgcagatggcgcagcaaaacggcgccgacttgaccatcaataataaggaacagccgctggcgcaggcgctggaatcgcagggtatccggccgacgctgattatcgacgccgcctgccatccggcgattttcgcagaggccatcgcactggcctcgccggcgggcaggatcgtattgatgggcttttctaccgaaccttcaatggtggcgcagcaggggattaccggcaaagagctcactatttattcttccagactcaatgccaataaattcccgctggttcttgagtggttggcaaacggattaataaatcctgatcggctcatcacccatcagtttgctttcgagcatgtagtcgatgccatgacgttatttgaagaagatcgcaagcattgttgtaaggtgttattaaccttcaacgcataa

SEQ ID NO: 6472 - protein, 339 aa, Klebsiella aerogenes
  misc_feature (29)..(29): Xaa can be any naturally occurring amino acid
MKSIVIQQPNALAIEERPLPQPGNGEVRXKVKLAGICGSDSHIYRGHNPFAKYPRVIGHEFFGVIDAVGEGVTDKVVGQRVTVDPVISCGHCYPCSVGKPNVCASLVVLGVHRDGGFSEYAVVPAKNAWPVPENVSDHHAVMVEPFTIAANVTGQAKPREQDIALVYGAGPMGLTTIQVLKRVYNVRQVIVADQIPERLQMAQQNGADLTINNKEQPLAQALESQGIRPTLIIDAACHPAIFAEAIALASPAGRIVLMGFSTEPSMVAQQGITGKELTIYSSRLNANKFPLVLEWLANGLINPDRLITHQFAFEHVVDAMTLFEEDRKHCCKVLLTFNA

SEQ ID NO: 6473 - DNA, 1140 bp, Enterobacter cloacae
  misc_feature (352)..(352): n is a, c, g or t
ttgagccgaccgtttaaccctatcctgctgttgctaacctgccttgttattgggcaggcgcaggcacaggcgcttagccgcgaaaaaatcgacggctggttgcaaaaccttggcgccagcgacaagtttgacgccagcaaaggcatcgactggggcgtcatgcccgggccattttatacgccggagctggggcttggattgggtacggctgttgtgggcatgtatcgcccggacccacatgacaccatcagccagaactccacgctgacgcttagcggctacgtcagctccaccggcgcgtttggccttagcgttaaaaactatgcctttttcgacaatgatttgtggcggntatttgttgaaggctcgatggccaacacaccgacttactactggggacaaggttttcacgccggcgacaaagacaatgagaaagaaaaatataccgcccaggtgctgacattgcgcccgatgctctaccggcagctcatcgataatgtttatctgggggcggggtggtcgctggcggcgcaaaatgccgatgagatggaccatgacgatctgccgaaaatagaaaacaccccgcaggggccatcggtattcagctccggcgccagtattgatatcaactgggacgatcgcgattttgtccccaacccacgcaagggccaatacgccgattttcgctatacccactatgcgccggggctcggcagcgacacgcgttttgatgagtttcgcctgcactacagccgctatcaggccctgagcgataaaagcgtgctggcctgggaagcggatggcacatttactcagggcgatgtgccgtggagcatgatgccgctgctcggtagcgatgagcgtatgcgcggctactaccaggggcgctaccgcgataaaaacgtggtcagctctcagctggaatatcgtcgtcagttgacgtggcgacacggcgttgttgcctgggtcggcgcgggcaccatggggccatccattgattccctgaacgacggacgctggctaccttcggcaggcgtcggctaccgctttgaattcaaacctcgcgttaatattcgcctcgactacggtgtcggcaagggcagcagcggcttttacttccaggtcggcgaagcgttctaa

SEQ ID NO: 6474 - protein, 379 aa, Enterobacter cloacae
  misc_feature (118)..(118): Xaa can be any naturally occurring amino acid
MSRPFNPILLLLTCLVIGQAQAQALSREKIDGWLQNLGASDKFDASKGIDWGVMPGPFYTPELGLGLGTAVVGMYRPDPHDTISQNSTLTLSGYVSSTGAFGLSVKNYAFFDNDLWRXFVEGSMANTPTYYWGQGFHAGDKDNEKEKYTAQVLTLRPMLYRQLIDNVYLGAGWSLAAQNADEMDHDDLPKIENTPQGPSVFSSGASIDINWDDRDFVPNPRKGQYADFRYTHYAPGLGSDTRFDEFRLHYSRYQALSDKSVLAWEADGTFTQGDVPWSMMPLLGSDERMRGYYQGRYRDKNVVSSQLEYRRQLTWRHGVVAWVGAGTMGPSIDSLNDGRWLPSAGVGYRFEFKPRVNIRLDYGVGKGSSGFYFQVGEAF

SEQ ID NO: 6475 - DNA, 891 bp, Klebsiella aerogenes
  misc_feature (803)..(803): n is a, c, g or t
atgaatactacttttcccagtaaagtcctcggcgatatgcgcgttactgccgtaagcgatggctatttgcaggtaggttttggcctgttaaccaaaattgatgaagacgagtgcagaaacattcaggcaaacgcccgtatagcacaaccgaatacggtcaacataaacacctttctggtacaacaagccgggatgaatatcctgatcgatagcggcgctggcggcgttaaagggtggggaggccaactgatcaataatctggctaaacttggcgtcaaaccagaggatattgacgccgtactgttgacccatgcgcatcccgatcacatcggtggcttaattaattcgcagcaagacgcggtatttcctcgtgctgaattgataatacctcaagatgaattcagttatctcgaagatgaccgtaatttggttacggccagtgaacgcgttaaaggtaatgttatgttcgcgcgcagcgtgtttaaacaatatcagcatcgtttacggctgattgatgaaggcgaggtgtttgctggtatcagtgccctggcattgaaaggacatacgccaggtcatacggggtatctcctctctggaagcatagaacgcgtattagtgtggggggatattgtgcattttccccatattcagttattagaccccgaggtcacgatagccttcgacttcgaccctcttttggcgcaggagacgcgcattcgccttcttgaaaaggtctgcgctgaacagatactggttgccgggatgcattttgatacagcaggtttcgccaggattaaaaaatnctcgtccggctatcaaattatcccggcggacggaattaatagccagtctcacgcagccgtggatcctgaaatacggatgccaccatga

SEQ ID NO: 6476 - protein, 296 aa, Klebsiella aerogenes
  misc_feature (268)..(268): Xaa can be any naturally occurring amino acid
MNTTFPSKVLGDMRVTAVSDGYLQVGFGLLTKIDEDECRNIQANARIAQPNTVNINTFLVQQAGMNILIDSGAGGVKGWGGQLINNLAKLGVKPEDIDAVLLTHAHPDHIGGLINSQQDAVFPRAELIIPQDEFSYLEDDRNLVTASERVKGNVMFARSVFKQYQHRLRLIDEGEVFAGISALALKGHTPGHTGYLLSGSIERVLVWGDIVHFPHIQLLDPEVTIAFDFDPLLAQETRIRLLEKVCAEQILVAGMHFDTAGFARIKKXSSGYQIIPADGINSQSHAAVDPEIRMPP

SEQ ID NO: 6477 - DNA, 891 bp, Klebsiella aerogenes
  misc_feature (266)..(266): n is a, c, g or t
atgaatactacttttcccagtaaagtcctcggcgatatgcgcgttactgccgtaagcgatggctatttgcaggtaggttttggcctgttaaccaaaattgatgaagacgagtgcagaaacattcaggcaaacgcccgtatagcacaaccgaatacggtcaacataaacacctttctggtacaacaagccgggatgaatatcctgatcgatagcggcgctggcggcgttaaagggtggggaggccaactgatcaataatctggctanacttggcgtcaaaccagaggatattgacgccgtactgttgacccatgcgcatcccgatcacatcggtggcttaattaattcgcagcaagacgcggtatttcctcgtgctgaattgataatacctcaagatgaattcagttatctcgaagatgaccgtaatttggttacggccagtgaacgcgttaaaggtaatgttatgttcgcgcgcagcgtgtttaaacaatatcagcatcgtttacggctgattgatgaaggcgaggtgtttgctggtatcagtgccctggcattgaaaggacatacgccaggtcatacggggtatctcctctctggaagcatagaacgcgtattagtgtggggggatattgtgcattttccccatattcagttattagaccccgaggtcacgatagccttcgacttcgaccctcttttggcgcaggagacgcgcattcgccttcttgaaaaggtctgcgctgaacagatactggttgccgggatgcattttgatacagcaggtttcgccaggattaaaaaatgctcgtccggctatcaaattatcccggcggacggaattaatagccagtctcacgcagccgtggatcctgaaatacggatgccaccatga

SEQ ID NO: 6478 - protein, 296 aa, Klebsiella aerogenes
  misc_feature (89)..(89): Xaa can be any naturally occurring amino acid
MNTTFPSKVLGDMRVTAVSDGYLQVGFGLLTKIDEDECRNIQANARIAQPNTVNINTFLVQQAGMNILIDSGAGGVKGWGGQLINNLAXLGVKPEDIDAVLLTHAHPDHIGGLINSQQDAVFPRAELIIPQDEFSYLEDDRNLVTASERVKGNVMFARSVFKQYQHRLRLIDEGEVFAGISALALKGHTPGHTGYLLSGSIERVLVWGDIVHFPHIQLLDPEVTIAFDFDPLLAQETRIRLLEKVCAEQILVAGMHFDTAGFARIKKCSSGYQIIPADGINSQSHAAVDPEIRMPP

SEQ ID NO: 6479 - DNA, 1383 bp, Klebsiella aerogenes
  misc_feature (701)..(701): n is a, c, g or t
atgtcgctggtaagtagttgttcacttgatcaaggttttgaggcgccgaggcgctatttagccgccgcggccatactaatcggcgtgctaatggcggcgctggatagttccattgtcaatgtcgccttgccttcgattgccagtgcgttacgggtcgattcggcgtccggtatctggatcatcaacggctatcaggtagccagcgcggcgacgatgctgatttgcgcgtcgctgggcagcagaatcggtgagaagcgtttttatacggcgggaatggcgttatttacgctctcttcgctgggctgtagccttgcgccgacctttggcgtactggttaccatgcgcatactgcaaggggtaagctatgcggtcatgataagcgtggggctgggcttgtaccgggttattttcccaccccgcgcgctaggaacgattttcgggctgaatgcgctggccttcgcggttggcacggctatcggtccggcgctgggcggatttatcatctcgtcgctctcctggccgtggcttttctatatcaatatcctgcctggcggcgctgcgattgttttctccttgatttcattaggggaggataacgaaaaggagcagggctttgattgggccggggccgtgagttcagcggcggcattaggcttgatggtggtggcggtcgatcaaattggccgctgggagggccgaangcttatctactgcgcggtggcatcagtggcgttatttgctttctttattatcgcccagacgcgagcgaagcatccactattgccgcttgatatatttcgctcacgccaatataccctggcggtgatctcgtccagctctttgttcatcgcccagggaatggcattggtcggtttaccgtttgtattgcaacatacctaccattactcagtactggaatcggcttttatctttacgccgtggccggtggcggtcgcaatctgcgccccgctggcgggaagcttatcaaaccgttttaatccgacgcagatttcaactgtcggggtggttatcttttgtcttggcttaggctcgctggcactgttgccgggcgctgcgacggtgaatgattttctgtggcggaccgccgtttgcggggtggggtatggcttattcctgccgccaaataataaggagatgtttgctaatgtctcagcaaatcgcacggcaacggcctccggggtattatccaccgccaggacgactgggctgtccatcggtgcggcgctggtggcgatggttattgcgctgttgaacggcttaaccggcccaggcggcgcacagtttgccgtttatgtgtttggcctcgcctgcgctattgctgcgatatcctctattgccagtaccttacgcttgcatcgctaa

SEQ ID NO: 6480 - protein, 460 aa, Klebsiella aerogenes
  misc_feature (234)..(234): Xaa can be any naturally occurring amino acid
MSLVSSCSLDQGFEAPRRYLAAAAILIGVLMAALDSSIVNVALPSIASALRVDSASGIWIINGYQVASAATMLICASLGSRIGEKRFYTAGMALFTLSSLGCSLAPTFGVLVTMRILQGVSYAVMISVGLGLYRVIFPPRALGTIFGLNALAFAVGTAIGPALGGFIISSLSWPWLFYINILPGGAAIVFSLISLGEDNEKEQGFDWAGAVSSAAALGLMVVAVDQIGRWEGRXLIYCAVASVALFAFFIIAQTRAKHPLLPLDIFRSRQYTLAVISSSSLFIAQGMALVGLPFVLQHTYHYSVLESAFIFTPWPVAVAICAPLAGSLSNRFNPTQISTVGVVIFCLGLGSLALLPGAATVNDFLWRTAVCGVGYGLFLPPNNKEMFANVSANRTATASGVLSTARTTGLSIGAALVAMVIALLNGLTGPGGAQFAVYVFGLACAIAAISSIASTLRLHR

SEQ ID NO: 6481 - DNA, 744 bp, Klebsiella aerogenes
  misc_feature (8)..(8): n is a, c, g or t
atgaaagntattattgtggaagatgagttcccggcgcagcaggaactcacctggttgattaatactcacagccagatggagatcgtcggcacctttgacgacggtctcgatgtgctgaaattcctgcagcacaataaagtcgatgccatctttctcgacatcaatattccctctctggacggcgtactgctggcgcaaaatattagccagttcgcgcataagccgtttatcgtttttatcaccgcgtggaaagaacatgcggtggaagcctttgaactggaagcgtttgactacatccttaagccttatcaggaatcgcggattattaacatgctgcagaagctgtccagcgcctggcagcaacagcagcaggtggcggtgagcggcgcgcccgcgcacaacccaacccgcgaaaacgacaccattaatctgattaaagacgagcggatcatcgtcaccagcattcatgatatttattacgcggaagcgcatgaaaaaatgaccttcgtttatacgcgccgtgaatcattcgtcatgccgatgaacatcactgaattctgcagcaaactgccggctgcgcacttctttcgctgccaccgctcgtactgcgtcaatctgaataaaattcgcgaaatagagccatggttcaacaacacctacgtcctacggctacgcgaccttgagtttcaggtgccggtcagccgcagtaaggtgaaagagtttcgccagttgatgaatctgtaa

SEQ ID NO: 6482 - protein, 247 aa, Klebsiella aerogenes
  misc_feature (3)..(3): Xaa can be any naturally occurring amino acid
MKXIIVEDEFPAQQELTWLINTHSQMEIVGTFDDGLDVLKFLQHNKVDAIFLDINIPSLDGVLLAQNISQFAHKPFIVFITAWKEHAVEAFELEAFDYILKPYQESRIINMLQKLSSAWQQQQQVAVSGAPAHNPTRENDTINLIKDERIIVTSIHDIYYAEAHEKMTFVYTRRESFVMPMNITEFCSKLPAAHFFRCHRSYCVNLNKIREIEPWFNNTYVLRLRDLEFQVPVSRSKVKEFRQLMNL

SEQ ID NO: 6483 - DNA, 282 bp, Enterobacter cloacae
  misc_feature (79)..(79): n is a, c, g or t
atggctaaaacagcggcagcactgcatatcctggtaaaagaagagaaactggctctcgatctgcttgagcagctcaaanacggcgccgacttcggcaagctggcgaaaaaacactctatctgcccgtcaggaaaacgcggcggcgatctgggcgaattccgccagggccagatggttccggcattcgataaagtggttttctcctgcccggaactggagccaaccggcccgctgcatacccagttcggttaccacatcatcaaagtgctgtaccggaaataa

SEQ ID NO: 6484 - protein, 93 aa, Enterobacter cloacae
  misc_feature (27)..(27): Xaa can be any naturally occurring amino acid
MAKTAAALHILVKEEKLALDLLEQLKXGADFGKLAKKHSICPSGKRGGDLGEFRQGQMVPAFDKVVFSCPELEPTGPLHTQFGYHIIKVLYRK

SEQ ID NO: 6485 - DNA, 603 bp, Enterobacter cloacae
  misc_feature (505)..(505): n is a, c, g or t
atgaatgataaagtcaatataacgaccgataacagcaacgatctaagccgcattaatgaggcggtatcgcggcgtattaagcagtttcgacgcgaaaagaagatctctctcgacgagctttcccgtcgcgccggcgtcagtaaagggatgctggtggatatcgaagggtgtagggcgaatcccagtatcgcgctgttgtgcaaaatcgctgcggcgatgggggtgtcggtggcggagtttgtcaacgttgccagtgagccgatggttcatcttatcgaccgtgatgcgattccggtattatggcgcggcgagcagggcggcagcgccaggctgctggccggcaccagcggaccggatatgcttgaactctggcagtggcggatgttgcctggcgaatcgttccgttcgccggggcatccggccgatacctgggaactgctatacgtgaccgagggagaactcaccctgacggtgaataatgacccatatcaggtggctgaagggngttctgcggtagcacgtaccgatgtgccgcatgaatattgtaatttcagtcagttgcccgtcgtctttaccatgaccgtgtatgagaaagggcgctaa

SEQ ID NO: 6486 - protein, 200 aa, Enterobacter cloacae
  misc_feature (169)..(169): Xaa can be any naturally occurring amino acid
MNDKVNITTDNSNDLSRINEAVSRRIKQFRREKKISLDELSRRAGVSKGMLVDIEGCRANPSIALLCKIAAAMGVSVAEFVNVASEPMVHLIDRDAIPVLWRGEQGGSARLLAGTSGPDMLELWQWRMLPGESFRSPGHPADTWELLYVTEGELTLTVNNDPYQVAEGXSAVARTDVPHEYCNFSQLPVVFTMTVYEKGR

SEQ ID NO: 6487 - DNA, 1149 bp, Enterobacter cloacae
  misc_feature (1011)..(1011): n is a, c, g or t
atgagttcatcgtgtatagaagaagtaagtgtaccaaacgatgattggtaccggattgcagctgaattattgggccgtgccggaattgagatcaatggttccgcaccctccgatatccgggtaaaaaacccgctcttttttaaacgcgtgttacaagaagggtctctcggattaggcgaaagctatatggacggctggtgggaatgcgaacgcctggatatattctttcacaaggtattgcgcgccgggctggataagcaactcccccaccacttcaaagatacgctacgtatcgctggcgctcgcctgtttaatctgcaaagcaaaaaacgcgcctggattgttggtaaagaacactacgatttaggcaacgaccttttccaccgcatgctcgatccctatatgcaatattcctgcggatactggaaagaggccgaaaatctggaacaggcgcagcaggataaattagatcttatctgtcgcaaactgcagcttgagccgggaatgaaagtgctggatatcggttgcggttggggcggactggcctattacatggccaaaaactataacgtcagtgtgacgggcgtgaccatttcggccgaacaacaaaaaatggcacaggagcgctgtgcaggattagatgtcaatattctgctgcaggactatcgcgatcttcacgaaagttttgaccgtatcgtctccgtcgggatgttcgagcacgttgggcctaaaaattacgccacttattttgaagttgtcgatcgtaatttaaaaccaaacggtcgttttctgctacacaccattggttcaaagattaccgatcacaacgtcgacccgtggattaataaatatatattccctaacggttgcctgccgtcggtacgccatatcgccgatgccagcgagaagcattttgtgatggaagattggcataactttggtgccgattatgacaccaccttgatggcctggtacgagcgttttcttgccagttggccggatattgccganaactattcagaccgtttcaaacgcatgtttacctattatctgaatgcctgcgcgggtgctttccgcgcccgcgacattcagctctggcaggtcgtcttctcgcgcggtgttgaacatggcctgcgcgtagcccgctag

SEQ ID NO: 6488 - protein, 382 aa, Enterobacter cloacae
  misc_feature (337)..(337): Xaa can be any naturally occurring amino acid
MSSSCIEEVSVPNDDWYRIAAELLGRAGIEINGSAPSDIRVKNPLFFKRVLQEGSLGLGESYMDGWWECERLDIFFHKVLRAGLDKQLPHHFKDTLRIAGARLFNLQSKKRAWIVGKEHYDLGNDLFHRMLDPYMQYSCGYWKEAENLEQAQQDKLDLICRKLQLEPGMKVLDIGCGWGGLAYYMAKNYNVSVTGVTISAEQQKMAQERCAGLDVNILLQDYRDLHESFDRIVSVGMFEHVGPKNYATYFEVVDRNLKPNGRFLLHTIGSKITDHNVDPWINKYIFPNGCLPSVRHIADASEKHFVMEDWHNFGADYDTTLMAWYERFLASWPDIAXNYSDRFKRMFTYYLNACAGAFRARDIQLWQVVFSRGVEHGLRVAR

SEQ ID NO: 6489 - DNA, 1065 bp, Klebsiella aerogenes
  misc_feature (52)..(52): n is a, c, g or t
atgcgccgtggtttgtgtttgtgctatagtagcgcccctttttacccggatncttatttattcgccatgatgccagaatccacgtctaccgcttttgccgcccaccgtttttctatcgcgcccatgctcgattggaccgacagacattgccgctatttcctgcgtctgctgtcgcgccatactctgctgtataccgaaatggtcactaccggcgcgattattcacggtaaaggcgactatctggcctatagcgaggaagaacatccggtggcgctgcagctgggggggagcgatcctgcggcgttggcgcaatgcgcgaagctcgccgaggcgcgcggctatgacgagattaacctcaacgtcggctgcccctctgaccgcgtgcagaacgggatgtttggcgcttgtctgatgggcaatgccgcgctggtggcggactgcatcaaagcgatgcgcgacgtggtgtcgatcccggtaacggtaaaaacccgtattggcattgacgatcgggatagctatgaattcctgtgtgatttcattgagaccgtctccggcaaaggggagtgtgaaatgttcatcattcacgcccgtaaagcctggctttccggcctgagcccgaaagagaaccgtgaaatcccgccgctggattatccgcgcgtctggcaactgaaacgtgattttccgcatctgacgatggcgattaacggcggaattaaatctctggcagaggccaaacagcagcttgagcacatggatggcgtgatggtggggcgtgaagcctatcaaaatccgggcattctggcttcggtggatcgtgagattttcggcgtcgacggcgcggatgccgatccggtggcggtggtgcgcgcaatgtacccctatatcgagcgtgagctcagcaacggtacctatctgggtcatatcacccgccatatgttggggttgttccaggggatccccggcgcgcgtcagtggcgccgctatctcagcgaaaacgcccacaaagcgggcgccgatatcaacgtgctggagcacgcgctgaagctggttgccgataagcgttaa

SEQ ID NO: 6490 - protein, 354 aa, Klebsiella aerogenes
  misc_feature (18)..(18): Xaa can be any naturally occurring amino acid
MRRGLCLCYSSAPFYPDXYLFAMMPESTSTAFAAHRFSIAPMLDWTDRHCRYFLRLLSRHTLLYTEMVTTGAIIHGKGDYLAYSEEEHPVALQLGGSDPAALAQCAKLAEARGYDEINLNVGCPSDRVQNGMFGACLMGNAALVADCIKAMRDVVSIPVTVKTRIGIDDRDSYEFLCDFIETVSGKGECEMFIIHARKAWLSGLSPKENREIPPLDYPRVWQLKRDFPHLTMAINGGIKSLAEAKQQLEHMDGVMVGREAYQNPGILASVDREIFGVDGADADPVAVVRAMYPYIERELSNGTYLGHITRHMLGLFQGIPGARQWRRYLSENAHKAGADINVLEHALKLVADKR

SEQ ID NO: 6491 - DNA, 1959 bp, Klebsiella oxytoca
  misc_feature (1400)..(1400): n is a, c, g or t
atgagccaaatacataaacaccctattcccgcagagattgcggaacattgcctgatgaatccgcaacagtaccaggtgaactaccaacaatccatcagcaaccccgatgccttctggggcgagcagggtaaaatcctcgattggatcaaaccttacacacaggtgaaaaatacctctttcgcgccgggaaacatctccatcaaatggtatgaagatggcaccctgaacctcgcggccaactgtctcgaccgtcatctgcacgagcgcggcgaccagaccgctatcatctgggaaggcgacgacgccagccagagcaaaaatatcacttatcgccagcttcatcgcgatgtttgccgttttgccaacgtattgctcgatctgggcattaaaaaaggcgatgtcgttgctatctatatgccgatggtgcctgaagccgccgtcgccatgctggcctgcgcgcgcatcggcgctatccattcggttatcttcggcggcttttcgccggaagcggttgccggacgcattatcgactccagcgctcgcctggtgatcacctctgacgaggggttacgcgccggtcgcgccatcccgctgaagaaaaacgtcgatgatgcgctgaaaaacccgcacgtcaccagcatcgagcacgtagtggtactcaaacgcaccggcggcaaaatcgactggcaggaaggtcgtgacctgtggtggagcgatctgattgaaaaagcggatgaccaacatgaagcggtggaaatgaacgccgaagacccgctgttcatcctctatacctccggctcgaccggcaagcctaaaggcgtgctgcacactaccggcggctacctggtgtatgcggcgactaccttcaaatacgtctttgattatcatccgggcgatatctactggtgcaccgccgatgtgggctgggtcaccggtcacagctacctgctgtacggcccgctggcctgcggcgccaccacgctgatgtttgaaggcgtgccaaactggccgaccccggcgcgcatgtgccaggtagtggataaacatcaggtcaatattctgtacaccgcgccgacggcgatccgcgcgctgatggcggagggcgacaaagctatcgaaggtaccgatcgttcctcactgcgcatcctcggctcggtcggcgagccgattaacccggaagcctgggagtggtactggaagaagatcggcaacgaaaaatgcccggtgatggacacctggtggcagaccgaaaccggcggcttcatgatcaccccgttgccgggcgccaccgaactgaaggccggttccgccacgcgtccgttcttcggcgtccagccggtactggtggacaacgaagggacgccgctggaaggcgcgaccgagggcaacctggcgatcgncgactcctggcctggccaggcgcgtaccctgtttggcgatcatgaacgcttcgagcagacctacttctcaacctttaaaaatatgtactttagcggcgacggcgcccgtcgcgacgaagatggttactactggatcaccggtcgcgtcgatgacgtactgaacgtctccggccaccgtctgggcaccgcggaaattgaatccgcgctggtttcgcatccgaaaatcgccgaagcggcggtggtcggtattccgcataacatcaaaggccaggccatctacgcctacgtgacgctgaatcacggcgaagagccgacgccggagctgtatgccgaagtacgtaactgggtacgcaaagagattggcccgctggcgacgccggatgtactgcactggactgactcgttgccgaaaacccgctccggcaaaatcatgcgccgtattctgcgtaagattgccgctggcgataccagtaatctcggggatacctcgacgctggccgatccgggcgtagtggacaaactgctcgaagagaagcaggccattgcgatgccgtcataa

SEQ ID NO: 6492 - protein, 652 aa, Klebsiella oxytoca
  misc_feature (467)..(467): Xaa can be any naturally occurring amino acid
MSQIHKHPIPAEIAEHCLMNPQQYQVNYQQSISNPDAFWGEQGKILDWIKPYTQVKNTSFAPGNISIKWYEDGTLNLAANCLDRHLHERGDQTAIIWEGDDASQSKNITYRQLHRDVCRFANVLLDLGIKKGDVVAIYMPMVPEAAVAMLACARIGAIHSVIFGGFSPEAVAGRIIDSSARLVITSDEGLRAGRAIPLKKNVDDALKNPHVTSIEHVVVLKRTGGKIDWQEGRDLWWSDLIEKADDQHEAVEMNAEDPLFILYTSGSTGKPKGVLHTTGGYLVYAATTFKYVFDYHPGDIYWCTADVGWVTGHSYLLYGPLACGATTLMFEGVPNWPTPARMCQVVDKHQVNILYTAPTAIRALMAEGDKAIEGTDRSSLRILGSVGEPINPEAWEWYWKKIGNEKCPVMDTWWQTETGGFMITPLPGATELKAGSATRPFFGVQPVLVDNEGTPLEGATEGNLAIXDSWPGQARTLFGDHERFEQTYFSTFKNMYFSGDGARRDEDGYYWITGRVDDVLNVSGHRLGTAEIESALVSHPKIAEAAVVGIPHNIKGQAIYAYVTLNHGEEPTPELYAEVRNWVRKEIGPLATPDVLHWTDSLPKTRSGKIMRRILRKIAAGDTSNLGDTSTLADPGVVDKLLEEKQAIAMPS

SEQ ID NO: 6493 - DNA, 1071 bp, Klebsiella aerogenes
  misc_feature (370)..(370): n is a, c, g or t
atgacgacgttccattcgcttaaggtggcgagagtcgagccggaaacccgcgatgcggtgaccatcacttttgcgattccgcaagccctgcaggcggaatactgttttcgcccgggccagcatctgacgctaaaagcccgtctgggcggcgaagaactgcgccgctgttactccatttgtcgcagccgcacgccaggcgaaattagcgtcgcggtcaaagccatcgacggcgggcgcttctcgcgctacgcccagcacgatatccagcagggtatggagctggaagtgatggtgccgcaggggcatttcggttatcaaccgcaggccgaacggcagggtgagtatctggcgattgccgccggttccgggntcacgccgatgatggcgatcattagcgcgacgctgacgaccgagccggaaagccgctttacgctgatctacggcaaccgcagcagccatagcatgatgttccgccaggcgctggccgatttaaaagaccgctatccgcagcgcctgcaggtgatacacctgtttagccaggagtcgatggacagcgatctgctacaggggcgcattgacggcgacaaactgcgccagctcgctgaccatctgctggatttcagccgtttcgacgaggcctttatctgcgggccggctgtgatgatggacgaggcggaagcgacgttacgtgaacttggcgtagcggagaaatcgattcatctcgaacgctttaataccccaggcggcaatgtgaagcgggccgctggagtgcaggcggaagggcgcacggtgaccatccgtcaggacgggcgcgatcggcttatcgccctcagcgccgaagacgacagcatcctggatgccgcattgcgtcagggcgccgatctgccgttcgcctgtaagggcggggtatgcgccacctgtaaatgcaaagtgctacgcggtgaagtggcgatggccgccaattacagcctggaagcggatgagctggcggcgggctacgtgctgagctgccagtcgttgccgaccagcggcgatgtggtggtcgactttgacgcgcgggggatggcatga

SEQ ID NO: 6494 - protein, 356 aa, Klebsiella aerogenes
  misc_feature (124)..(124): Xaa can be any naturally occurring amino acid
MTTFHSLKVARVEPETRDAVTITFAIPQALQAEYCFRPGQHLTLKARLGGEELRRCYSICRSRTPGEISVAVKAIDGGRFSRYAQHDIQQGMELEVMVPQGHFGYQPQAERQGEYLAIAAGSGXTPMMAIISATLTTEPESRFTLIYGNRSSHSMMFRQALADLKDRYPQRLQVIHLFSQESMDSDLLQGRIDGDKLRQLADHLLDFSRFDEAFICGPAVMMDEAEATLRELGVAEKSIHLERFNTPGGNVKRAAGVQAEGRTVTIRQDGRDRLIALSAEDDSILDAALRQGADLPFACKGGVCATCKCKVLRGEVAMAANYSLEADELAAGYVLSCQSLPTSGDVVVDFDARGMA

SEQ ID NO: 6495 - DNA, 1176 bp, Klebsiella aerogenes
  misc_feature (73)..(73): n is a, c, g or t
atgagcctgcaaaaaacctggggaaaacgtcatctgactgcagtaggtatggtgctactctcggccctgctcnccggctgcgatgaaggcgtcgcgcaaaacgccgcgccgcaagcgcctgccgtcagcgccgctgaggtggtagtgaaatccattagtcagtgggatagctttaatggccggattgaggcggtggaaagcgtgcagctacgtccccgcgtttctggttatattgataaagtgaattacaccgacggtcaggaggtgaagaagggggaggtgttattcaccattgacgatcgaacctatcgcgcggcgctggaacaggcgcaggcaaccctggcaagagcgaaaacgcaagccagcctggcgcgcagtgaagcaaaccgtaccgataaattaatcaataccaatctggtttcccgtgaagagtgggagcagcgccgctccgcagcggtccaggcgcaagcggatattcgcgccgcgcaggcggcggttgatgccgcgcagcttaatctggatttcaccaaagtgaccgcgcccatcgacggccgcgccagccgcgcgttaatcaccagcggtaatctggtcaccgctggcgataccgccagcgtccttaccacgctggtgtcgcagaaaacggtttatgtctactttgacgtggatgagtcgacctatcttcactaccaaaatcttgcccgcagggggcagggggcctccagcagccaccaggcattgccggttgagatcggccttgtgggcgaagagggctaccctcatcagggcaaagtggattttctggataatcagttaacgccgagcaccggtacgatccgcatgcgcgcgctgctggacaattcgcagcgtctgttcacgccgggactctttgcccgcgtccgcttgccaggcagcgctgaattcaaagccacgcttatcgacgacaaagcggtactgaccgatcaggaccgtaaatatgtctatatcgttgataaagagggtaaagcccagcgtcgcgatattgcgccggggcggttggctgccggtttacgtatcgtcaagcaggggctgaaccctggggataaagtcatcgtcgatggtttgcaaaaagtgtttatgccgggaatgccggttaacgcgaagaccgttgccatgaccaccagcgccgccctcaactga

SEQ ID NO: 6496 - protein, 391 aa, Klebsiella aerogenes
  misc_feature (25)..(25): Xaa can be any naturally occurring amino acid
MSLQKTWGKRHLTAVGMVLLSALLXGCDEGVAQNAAPQAPAVSAAEVVVKSISQWDSFNGRIEAVESVQLRPRVSGYIDKVNYTDGQEVKKGEVLFTIDDRTYRAALEQAQATLARAKTQASLARSEANRTDKLINTNLVSREEWEQRRSAAVQAQADIRAAQAAVDAAQLNLDFTKVTAPIDGRASRALITSGNLVTAGDTASVLTTLVSQKTVYVYFDVDESTYLHYQNLARRGQGASSSHQALPVEIGLVGEEGYPHQGKVDFLDNQLTPSTGTIRMRALLDNSQRLFTPGLFARVRLPGSAEFKATLIDDKAVLTDQDRKYVYIVDKEGKAQRRDIAPGRLAAGLRIVKQGLNPGDKVIVDGLQKVFMPGMPVNAKTVAMTTSAALN

SEQ ID NO: 6497 - DNA, 759 bp, Enterobacter cloacae
  misc_feature (656)..(656): n is a, c, g or t
atgaccacaactatcgatatcccacgtatctttaccatcagcgaaagtgaacatcgtatccataaccccttcacggcggaaaaatatgccacgcttggccgcgtacttcgcctgcaggcaggggcgcagatcctcgaccttggcagcggttctggtgaaatgctctgcacctgggcgcgggaccatgctatcggcggtctgggcattgatatgagcccattgtttaccgcgcaggctaaacaacgcgccgcagcgcttggcgttagcgatcgcgtcacttttctccatagcgatgcggcaggttacgttgccgaacggcaatacgatgtagcggcctgtatcggcgcgacgtggattgccggcggcgtcgctggaaccgtggcgcagttagcccgcagccttaagcctggcggtatgctacttatcggggaaccctggtggcgtaaggtacccgccacagaagaacaggcgcgcgcctgcggcgtttctgcggtggccgatttgttgccgcttccagcgctggtcgccacttttggcgaactgggctatgacattgttgagatggtgctggctgaccgcgaagggtgggaccgttatgaagccgctaaatggctaacgatgcgccgttggctgctggcgaatcccgacgatgaatntgcggctgaggtacgtgcggagctcaatgccgcaccgcttcgccatgtcacttatacccgggaatatttcggttggggcgtttttgcgctgatgcagaaataa

SEQ ID NO: 6498 - protein, 252 aa, Enterobacter cloacae
  misc_feature (219)..(219): Xaa can be any naturally occurring amino acid
MTTTIDIPRIFTISESEHRIHNPFTAEKYATLGRVLRLQAGAQILDLGSGSGEMLCTWARDHAIGGLGIDMSPLFTAQAKQRAAALGVSDRVTFLHSDAAGYVAERQYDVAACIGATWIAGGVAGTVAQLARSLKPGGMLLIGEPWWRKVPATEEQARACGVSAVADLLPLPALVATFGELGYDIVEMVLADREGWDRYEAAKWLTMRRWLLANPDDEXAAEVRAELNAAPLRHVTYTREYFGWGVFALMQK

SEQ ID NO: 6499 - DNA, 2616 bp, Klebsiella aerogenes
  misc_feature (112)..(112): n is a, c, g or t
atgacacaacagccccaagccaaataccgccacgactaccgtgcgccggattatctgattagcgatattgatttgacctttgacctggatgccgcgaaaaccgttgtcacgnccgagagtaaggtttcccgtcacgcggctgcgtctgatgtgccattgcgtctggatggcgaagacctgaccctgatttcactgcaggtgaacggtcagccgtggagtgactataaagaagaaaataatcagctggtgattggcggtttgccggacagtttcaccctgactatcgtcaacgaaattagcccggcggcgaacaccgcgctggaaggcctgtatcagtcaggcgaagcgctatgtacccagtgtgaagctgaaggtttccgccatattacctggtatctggaccgcccggatgtgctggcgcgcttcaccaccaaaatcattgccgataaagccaaatacccctacctgctttctaacggcaaccgcgtcgcgcagggcgagctggacaatggccgtcactggatccagtggcaggatccgttcccaaaaccctgttacctgttcgcgctggtggccggcgatttcgatgtgctgcgtgacaccttcaccacccgttccgggcgtgaagtcgcgcttgaactatacgttgaccgcggcaacctcgaccgcgcgccatgggcgatgacctcgctgaaaaattcaatgaagtgggacgaaacccgtttcggtctcgaatatgacctcgacatctatatgatcgtcgccgtcgacttcttcaatatgggggcgatggagaacaaaggcctcaacgtctttaactctaaatacgtgctggcccgtaccgataccgcgaccgataaagattacctcgatattgagcgcgtcattggtcacgaatatttccataactggaccggcaaccgcgtgacctgtcgcgactggttccagctcagcctgaaagaagggctgaccgtattccgcgatcaggaattcagttccgacctcggctcgcgcgcggtgaaccgcatcaacaacgttcgtaccatgcgtgggctgcagtttgccgaagacgccagcccgatggcgcacccgatccgtccggatatggttattgagatgaacaacttctacaccctgacggtatacgaaaagggcgcggaagtgatccgtatgctgcacaccctgctcggcgaagccaatttccagaaagggatgcagttgtactttgagcgccacgacggcagcgccgccacctgcgatgatttcgtgcaggcgatggaagatgcttcgaacgtcgatctgtcgcatttccgtcgctggtacagccagtccggcacgccggtcgttaccgtgcatgacgactataacccggaaaccgagcagtacaccctgactatcagccagcgtacgccgccgaccgcggaacaggccgacaagcagccgctgcacatcccgttcagtatcgagctgtacgataacgaaggcaaagcgatcccgctgcagaaaggcggccatccggtgcaccacgtgttgaatgtcacccaggcggaacagacgttcgtctttgataacgtttacttccagccggtaccggcgctgctgtgtgaattctccgcgccggtcaagcttgaatataagtggagcgaccagcagctgacgttcctgatgcgccacgcgcgtaacgacttctcgcgttgggatgccgcgcagagcctgctggcgacctacatcaagctcaacgttaaccgccatcagcaggggcagccgctgtcgctgccgatccacgtcgctgacgctttccgcgcgattctgctcgacgagaagatcgatccggcgctggcggcggaaattttaacgctgccgtcggccaacgaaatcgccgaactgttcaccatcatcgatccgattgccatcgcggcggtgcgcgaagcgctgacccgtacgctggcgaaagagctggccgatgagctgctggtggtttacaacgccaacaagctcgacagctatcgcgtagaccatgccgatatcggtaaacgttccctgcgcaatacctgcctgcgctatctggcttttggcgatgttgaactggcagataagctggtgcaagcccagtatcatcatgctgacaacatgaccgacgcgttggctgcgctgtcgtcggcggtggcggctgagttgccgtgccgtgatgcattgatgcaggagtatgacgataagtggcaccaggacggcctggtgatggacaagtggtttattctgcagtccaccagcccggcggccaatgtggttgagacggtacgcggcttgctcaagcaccgttcattcacgatgagcaacccgaaccgggtacgctcgctgatcggcgccttcgcgagtagcaacccggcggcgttccacgccgaagacggcagcggttaccagttcctggtggaaatgctgaccgagctcaatagccgcaacccgcaggtggcgtcgcgtctgattgagccgctgattcgtctaaaacgctacgatgagaaacgtcaggccaagatgcgtgcggcgctggaacagctgaaagggctggagaatctctccggcgatctgttcgagaagatcggcaaagcgctggcgtaa

SEQ ID NO: 6500 - protein, 871 aa, Klebsiella aerogenes
  misc_feature (38)..(38): Xaa can be any naturally occurring amino acid
MTQQPQAKYRHDYRAPDYLISDIDLTFDLDAAKTVVTXESKVSRHAAASDVPLRLDGEDLTLISLQVNGQPWSDYKEENNQLVIGGLPDSFTLTIVNEISPAANTALEGLYQSGEALCTQCEAEGFRHITWYLDRPDVLARFTTKIIADKAKYPYLLSNGNRVAQGELDNGRHWIQWQDPFPKPCYLFALVAGDFDVLRDTFTTRSGREVALELYVDRGNLDRAPWAMTSLKNSMKWDETRFGLEYDLDIYMIVAVDFFNMGAMENKGLNVFNSKYVLARTDTATDKDYLDIERVIGHEYFHNWTGNRVTCRDWFQLSLKEGLTVFRDQEFSSDLGSRAVNRINNVRTMRGLQFAEDASPMAHPIRPDMVIEMNNFYTLTVYEKGAEVIRMLHTLLGEANFQKGMQLYFERHDGSAATCDDFVQAMEDASNVDLSHFRRWYSQSGTPVVTVHDDYNPETEQYTLTISQRTPPTAEQADKQPLHIPFSIELYDNEGKAIPLQKGGHPVHHVLNVTQAEQTFVFDNVYFQPVPALLCEFSAPVKLEYKWSDQQLTFLMRHARNDFSRWDAAQSLLATYIKLNVNRHQQGQPLSLPIHVADAFRAILLDEKIDPALAAEILTLPSANEIAELFTIIDPIAIAAVREALTRTLAKELADELLVVYNANKLDSYRVDHADIGKRSLRNTCLRYLAFGDVELADKLVQAQYHHADNMTDALAALSSAVAAELPCRDALMQEYDDKWHQDGLVMDKWFILQSTSPAANVVETVRGLLKHRSFTMSNPNRVRSLIGAFASSNPAAFHAEDGSGYQFLVEMLTELNSRNPQVASRLIEPLIRLKRYDEKRQAKMRAALEQLKGLENLSGDLFEKIGKALA

SEQ ID NO: 6501 - DNA, 585 bp, Klebsiella pneumoniae
  misc_feature (566)..(566): n is a, c, g or t
atgacattacaaaccgcctttaccctaccggtgcaggatgcccaacacagtttccgccgcctgctgaaagcaatgagcgagccgggagtgattgtctccctgcagcagcttcagcacggctggcagccattgaatatcgcctccaccagcttgctgctgaccctggccgatcacgacaccccggtgtggatggccgccgcgctgcataacgatctggtcagccaaaatctgcgctttcataccggctcgacgctggtggaacagccgcagcaggcggtatttgccgtcgcctgcgacaccatcagcgccgaacagcttaatgtcctttccgctggtaccgtggcggcgccggaaaccggcgtcacgctgattgttcaactagccagcctgagcggcggacgcatgctgcgcctgaccggcgcgggcattgccgaggagcgaatgatcgccccccagctcccggactgcatcatcgacgaattaaccgaacgcccgcacccgttcccactgggcattgacctgatcctgacctgcggcgagcgcctgctggctatcccgcgtaccanccacgtggaggtgtgctaa

SEQ ID NO: 6502 - protein, 194 aa, Klebsiella pneumoniae
  misc_feature (189)..(189): Xaa can be any naturally occurring amino acid
MTLQTAFTLPVQDAQHSFRRLLKAMSEPGVIVSLQQLQHGWQPLNIASTSLLLTLADHDTPVWMAAALHNDLVSQNLRFHTGSTLVEQPQQAVFAVACDTISAEQLNVLSAGTVAAPETGVTLIVQLASLSGGRMLRLTGAGIAEERMIAPQLPDCIIDELTERPHPFPLGIDLILTCGERLLAIPRTXHVEVC

SEQ ID NO: 6503 - DNA, 1386 bp, Enterobacter cloacae
  misc_feature (921)..(921): n is a, c, g or t
atgaatacgcaattcacatggcttcacatcggtctcggttcttttcatcgcgcccatcaggcgtggtacctgcatcgactgcgggtttccggcgattcgcgctggcatatcgcggcgggaaatattcgtaacgacgccgagcatgtggtgcaggcgctggcggagcagagagggcgctacgtcctcgagacggtgagcccggaaggggagcgcgaatatgaagagatcgcctcaattcaaaaattactgccgtggcaggcgggactgcagccgctgattgatgaaggcgcgaacccgcagactaaagtcattgctttcacggtgacggaagggggttattacctcaatacgcagcatcgcctggaaaccagcaacgccgatctgcaggccgatttgcagggggattgcaaaaccatttatggcaccatcacccggattcttgaaaaacgcatcgccgacgacgcgggtccgctgacgctgctcaactgtgacaacgtgcgccacaacggcgaacgtttccatgatgggctggtggagtttctgcaactgaccggtaaacagcaggttattgactggctggcggcgaacgcgacctgcccaaacaccatggtcgatcgtattacgccgcgcccggccgccgatctggcgccacgtatcaaagcgcaaaccggcatcgatgataaagcgccggtgatgggcgaaacctttattcaatgggtagtggaagataatttccgcgctgagcgcccggcgcttgagacggtgggcgtggagatggtggcgtcggttatcccctatgaagaggcgaagattcgcattcttaacgcgtcacatagctgtattgcctgggcgggaaccctgttgggccagcaatatattcacgagagtacgcttaccgatgccatctacgccattgctgancgttacgtcagcgaagatgtgatcccgtgtctgggtgataacggcatcgacctggcaacctatcgcgacgtggtactcaagcgttttaccaacccctatatccaggacaccaaccagcgggtggcagccgatggattctcaaaaatcccggcgatgattgccccaaccctgcaggagtgctaccagcgcggcgtgcgcccgcaggctaccgctatgttgccggcgctgttttttgtctttatgcagcagtggcataaaggggctttaccgtatcagtaccaggacggaattctcgatgaggccgcggtgcatgccatgtttaattcgcctgatccgatcgcccggtacgctgctgataaagccttatttggcgagctggcggaatcggcggattttcaggcgctgctgcgtgagcaaatcgccgccgtctacgcgttgacccagcaggaggcgctatgtatttag

SEQ ID NO: 6504 - protein, 461 aa, Enterobacter cloacae
  misc_feature (307)..(307): Xaa can be any naturally occurring amino acid
MNTQFTWLHIGLGSFHRAHQAWYLHRLRVSGDSRWHIAAGNIRNDAEHVVQALAEQRGRYVLETVSPEGEREYEEIASIQKLLPWQAGLQPLIDEGANPQTKVIAFTVTEGGYYLNTQHRLETSNADLQADLQGDCKTIYGTITRILEKRIADDAGPLTLLNCDNVRHNGERFHDGLVEFLQLTGKQQVIDWLAANATCPNTMVDRITPRPAADLAPRIKAQTGIDDKAPVMGETFIQWVVEDNFRAERPALETVGVEMVASVIPYEEAKIRILNASHSCIAWAGTLLGQQYIHESTLTDAIYAIAXRYVSEDVIPCLGDNGIDLATYRDVVLKRFTNPYIQDTNQRVAADGFSKIPAMIAPTLQECYQRGVRPQATAMLPALFFVFMQQWHKGALPYQYQDGILDEAAVHAMFNSPDPIARYAADKALFGELAESADFQALLREQIAAVYALTQQEALCI

SEQ ID NO: 6505 - DNA, 1320 bp, Klebsiella michiganensis
  misc_feature (1282)..(1282): n is a, c, g or t
atgaacaatgttctgggatttcttgaagcaaaactgatgcctctggcggcgaaaactgcccagcagcgtcatctcggcgctattcgtggcgcctatgtttcattcatgccttttattattgtcggttcaattctgctggtgatctcgtcgtttcctaatcagagctatcagcagtttatggccagcaccttcggcgccagctggagtgcgataattgaaatcccgttcaatgcggtattttccacgatgtcgctgtttatcagcttcctggtggcctaccgcctggcggagcactacggggatgaccgtatctcctgcggcatcctgtcgctggtgggatttttgatcctcaccccctttattaaagtcgctgaaaacggcggtatcacggtgatccccgttgaatggatcggtaccaaaggtttgttcgtcgccatgatcggttcgctgctgtggaccgaactcttctgctggttaaagcgcaagaagctggtgattaagatgcctgacggggttccacccgccgtgcaggagtctttcgccgccctgatcccggccctgctggtgatgattctgatcctggcgattcgcatcgggtttgaacacacgcactacgccactattcaccagttcatttatgaggtcgtcgcctcgccggttcgccattacggtacctcctatttcggcgcactgatgaccgtattcagcatcactattctgtggtccgtcggcatcaactccggttcaatgatcaacggcattattcgtcctttgtggatggaaaatcagaccgataacatcgccgcgattcaggccggcgtgaccccgccgcacattatcaccgagcagttcttcgatatgatctggatgggcggcgcgggcgcaacgctgtcgctggtgatcgccatgctgattttcgcccgcagtaaaaatatgcgcgaggtcgcccgcctcggggccggcgcttccatctttaatatcaacgaacccatcctcttcggcctgccggtgatcatgaacccgatcatgctgatcccctttaacctcgtgccgctggtgctggtcacggtgcagtacgcggcgatgaaaatcggcgcggtggccgtcaccaccggggtgtttattccctggacgctgccgccggtgatcagcgggtttatcgtgaccggacatcttagcggcagcgtaatgcagatcctcaatttgctgattggcgccatgctatacctgcctttcatgcgtatcgtcgataagcagtatcgcgcggcggagacaacctccngtaccgaaacggacaacacgcttgctaaacaggagtaa

SEQ ID NO: 6506 - protein, 439 aa, Klebsiella michiganensis
  misc_feature (428)..(428): Xaa can be any naturally occurring amino acid
MNNVLGFLEAKLMPLAAKTAQQRHLGAIRGAYVSFMPFIIVGSILLVISSFPNQSYQQFMASTFGASWSAIIEIPFNAVFSTMSLFISFLVAYRLAEHYGDDRISCGILSLVGFLILTPFIKVAENGGITVIPVEWIGTKGLFVAMIGSLLWTELFCWLKRKKLVIKMPDGVPPAVQESFAALIPALLVMILILAIRIGFEHTHYATIHQFIYEVVASPVRHYGTSYFGALMTVFSITILWSVGINSGSMINGIIRPLWMENQTDNIAAIQAGVTPPHIITEQFFDMIWMGGAGATLSLVIAMLIFARSKNMREVARLGAGASIFNINEPILFGLPVIMNPIMLIPFNLVPLVLVTVQYAAMKIGAVAVTTGVFIPWTLPPVISGFIVTGHLSGSVMQILNLLIGAMLYLPFMRIVDKQYRAAETTSXTETDNTLAKQE

SEQ ID NO: 6507 - DNA, 822 bp, Klebsiella oxytoca
  misc_feature (520)..(520): n is a, c, g or t
atggaaataaagctgcatgccaacgccaccaccaccccaagaacgcgaaaatatctccaggagtcgacgaaaagcgaccgcgaactggcgcaggaactgggtatatcaatcactacggttcgtcgctggcgcaaccgcagccagatttcagataatcacaccacgccacatctgatacacaaagtgttgagacaagagcaggaggcgctgattaacgccctgcgcgatatactgcgtgcgccgctggacgagctgctgtttatggtgaatgaagggctgggtatcaccctttcacgggccacgctaaaccgctatcttcgtccggcccatgaagggcgaaaaaacgccgcgccgcagggaaagaaagcgttaaaagcgggaatgaggccggatactctgacgctgcattaccggcagctcgcgctgtcgatggacgatggcggcgagcatcatctgctgtgggcgcaggagccgatcagcggctggtgctttggtcgtatctattccggcatttcgcccncgctggtggatagctggctgaaccaggcgctggaagcctgtccggcgcagatacaatgtcttgagacttatgctcataagggcttcgaaccgatacgcgcggatttatcatgcacaacggtgatcgcggaggagcgcggggcgttacagcttagcgaacgattggccaatattatcccggcgctggatgagcctgacgcaacgctgcagcggctgtgcacgctgtggaaccagggacgggcgcaaaagaaactgggtgacaatacgccgcagggctttcttgcctcgctcaatcagatctaa

SEQ ID NO: 6508 - protein, 273 aa, Klebsiella oxytoca
  misc_feature (174)..(174): Xaa can be any naturally occurring amino acid
MEIKLHANATTTPRTRKYLQESTKSDRELAQELGISITTVRRWRNRSQISDNHTTPHLIHKVLRQEQEALINALRDILRAPLDELLFMVNEGLGITLSRATLNRYLRPAHEGRKNAAPQGKKALKAGMRPDTLTLHYRQLALSMDDGGEHHLLWAQEPISGWCFGRIYSGISPXLVDSWLNQALEACPAQIQCLETYAHKGFEPIRADLSCTTVIAEERGALQLSERLANIIPALDEPDATLQRLCTLWNQGRAQKKLGDNTPQGFLASLNQI

SEQ ID NO: 6509 - DNA, 1311 bp, Klebsiella oxytoca
  misc_feature (358)..(358): n is a, c, g or t
atgagcgagtttcttggcgtcctgcgctggatcaccatcaacatatttggtgaggcgtcgattttaattggcctgatcgtgctgctgggactggttttgcagaaaaaatcgctggcagacattgtgtccggcaccctgaaaggcattctgggttttctgatcatcggcgcgggggccgggattatcgtttccgcgctactgatctttcagccgatctggaccgaagttttcggcctcagctcgatgaatctgaccaatattatcggtcaggcgcgctttagcgaacgctacggaagcagcgtgacgatcgccattgccggcggtttcgctatcaatctactgctggccaggctgacgngctttaaatatatctatttgaccggacacatgatgttctggaccaccatgatatttgccggggtgatggtgaacaccgagcccgctatttctgcgctacagctgacgctcatgctgacggttatcatgggactgtactggaccttgcagcccgcgctggttcagccatgggtacggaaaattaccggcaacgataacgtggcgctggggcatacttccgcctcggtcgcgctgctgggggccattttcggccagatcttcgcccgtaataaaatcagttccgaagatatcaaagttcctaaaaagctcggttttctgcgcgattccaacgtggtgaccgcgttaaccatggcgctgctgttttttatcggcacctttattctgcaaatcaaaggcaccccgaaagcggcggagatccttgcgcaatccggcgacctgagcttctacatctatgcccttaaacaatcgctgatgttcaccggtggcatcgccgtggtgctgctcggggtgcggatgtttattggtgaaatggtgcccgcgtttaacggcatcggctcgcggctggttccgggggccaaacctgcgctggactgcccgattctgttcaactttgcgccaaatgcggtggtgctggggttcgtcggcgcctttgtgggatcgctgctgtggctgaccctgatcggccgctataccggctacgtatttattcccagcatgatcgtcattttcttccatgccggtacggcaggggtcttcggcaatatcaccggcggctataaaggcgcgctgctggcgggatttatcacctcaacggtggtcgcctggggacaatatttctgcgtgaccggctttatcaacaacacgatcccggatacggcgctgtgggcgggcgatagcgatatgtttgtcctcgcaccgttaatccatcttttgacccgcttgctgacgttctga

SEQ ID NO: 6510 - protein, 436 aa, Klebsiella oxytoca
  misc_feature (120)..(120): Xaa can be any naturally occurring amino acid
MSEFLGVLRWITINIFGEASILIGLIVLLGLVLQKKSLADIVSGTLKGILGFLIIGAGAGIIVSALLIFQPIWTEVFGLSSMNLTNIIGQARFSERYGSSVTIAIAGGFAINLLLARLTXFKYIYLTGHMMFWTTMIFAGVMVNTEPAISALQLTLMLTVIMGLYWTLQPALVQPWVRKITGNDNVALGHTSASVALLGAIFGQIFARNKISSEDIKVPKKLGFLRDSNVVTALTMALLFFIGTFILQIKGTPKAAEILAQSGDLSFYIYALKQSLMFTGGIAVVLLGVRMFIGEMVPAFNGIGSRLVPGAKPALDCPILFNFAPNAVVLGFVGAFVGSLLWLTLIGRYTGYVFIPSMIVIFFHAGTAGVFGNITGGYKGALLAGFITSTVVAWGQYFCVTGFINNTIPDTALWAGDSDMFVLAPLIHLLTRLLTF

SEQ ID NO: 6511 - DNA, 696 bp, Klebsiella michiganensis
  misc_feature (326)..(326): n is a, c, g or t
gtgattcttcccgcatttactcagggtatttatggtcgtctgcgcctgcaggccggtgctgactggcagcgctacgtcgcccatcccttcctgcgccagcttgccgatggcacccttcccgaacccgcttttcgtcgctatctgacgcaggactacctgttcctgatccactttgcccgcagctacgcgctgctggtgagcaagctgcgtaccctcgcggaaatgcgcgttgccgccgcgtccatgaacgccattctcgacgaactgccgctgcacgtcggctactgtacgggatgggggctggatgaagcgacgatggcggctgnagaggaagccgctgaaacggtaaattatacccgctacgtactggacattggccacgccggcgatgcgctggatctactggcggcgctgatgccctgcgtggccggctatgcggaaatcggcctcggtctgctgcacgacccggcgacccggctgactgccaacccgtatgcctcgtggatccgcaactacggtgatgagggctaccttaacggcgtcaatgcagccttaaacctgctggaaaccctctggcagcagcgcggcggcgaagcgcgttttgccgaactcagcgccattttcacgaccgctacgcgcctggaggctaacttctggcaaatgggccttaacgtcctcgcggagcgccaggcgtga

SEQ ID NO: 6512 - protein, 231 aa, Klebsiella michiganensis
  misc_feature (109)..(109): Xaa can be any naturally occurring amino acid
MILPAFTQGIYGRLRLQAGADWQRYVAHPFLRQLADGTLPEPAFRRYLTQDYLFLIHFARSYALLVSKLRTLAEMRVAAASMNAILDELPLHVGYCTGWGLDEATMAAXEEAAETVNYTRYVLDIGHAGDALDLLAALMPCVAGYAEIGLGLLHDPATRLTANPYASWIRNYGDEGYLNGVNAALNLLETLWQQRGGEARFAELSAIFTTATRLEANFWQMGLNVLAERQA

SEQ ID NO: 6513 - DNA, 900 bp, Klebsiella oxytoca
  misc_feature (517)..(517): n is a, c, g or t
gtgaaaagattggatctcaacgcgctgcgggtcttcgtcaccgtggcggaaaatggctcgtttagcgccggcgcaaaagcgctgcagatgccctcatcgaatgtgagccgacagatatcccagcttgagcagagccttcagctgcgcttgatacagcgcagtacccgacatatgaagctgacctctgccggtcagacgctgctcgccagtatgcgacccgtgctggagcagttagccgctacggaagctgagctaacgcaacagcaggcagaacccgaagggctcctacgcctgtgtctccctaacgaaattggcccctcgctgtttgcgccgctaatggcgcaatttgccctgcgctatccaaaaataaccgtgagctgtacgactaatctggcgggcacggaggtgttaaaagaagatgtggatattgcggtgatcatcactcgcggcaaaatggaagacatcagcgttattgcgcgcccgctcttttcgtttccctgctgcgtggtcgcttctncgcagctgatagccagaacgggtatgccgacagacagcgagcaattaacctcgctaccctgtatcaccaccgtcagcgccctcgcggggcaagcctggcagtttgtcgcggcggacgggagctttaaaaaggttaacgtcagcggacactatcgcgtcaacagcggcgaaatggcgctgcatgccgctcttgccggcgtcggattcgctattctgggggaacaaccctgccgcccgtttatcaatcgcggggagctacagcaagtcacgcttgagttaccgccggcgccgttacagctttcagccctctatcgggagcgccattttatgcccgccagaatgcgcgtctggcttgaatttatccagaggcagatggcaggctaa

SEQ ID NO: 6514 - protein, 299 aa, Klebsiella oxytoca
  misc_feature (173)..(173): Xaa can be any naturally occurring amino acid
MKRLDLNALRVFVTVAENGSFSAGAKALQMPSSNVSRQISQLEQSLQLRLIQRSTRHMKLTSAGQTLLASMRPVLEQLAATEAELTQQQAEPEGLLRLCLPNEIGPSLFAPLMAQFALRYPKITVSCTTNLAGTEVLKEDVDIAVIITRGKMEDISVIARPLFSFPCCVVASXQLIARTGMPTDSEQLTSLPCITTVSALAGQAWQFVAADGSFKKVNVSGHYRVNSGEMALHAALAGVGFAILGEQPCRPFINRGELQQVTLELPPAPLQLSALYRERHFMPARMRVWLEFIQRQMAG

SEQ ID NO: 6515 - DNA, 1698 bp, Klebsiella oxytoca
  misc_feature (1136)..(1136): n is a, c, g or t
atgcaattcactcataagaaaaaccgctctctttacatcccttacgccggccccgtgctgcttgaatttccgctgctcaataagggcagcgccttcagcatggaagagcgcagcagctttaatctgctgggcctgctgccggaagtggtcgaaaccatcgaagagcaggccgaacgcgcgtggatccaataccagggatttaaaaccgagatcgacaagcacatttacctgcgcaacattcaggataccaacgaaaccctgttctaccgtctggtcggcaaccacctcgatgaaatgatgccggtcatctataccccgaccgtcggcgccgcctgtgaacgcttctctgagatctatcgtcgcgcccgcggcgtgtttatctcttaccagaaccgcaataatctcgacgatattctgcaaaacgtaccgaaccataacgttaaggttatcgtgatgaccgatggcgaacgtattctcggcctcggcgaccagggcatcggcggaatgggcattcctatcggcaaactgtcgctgtataccacctgcggggggatcagcccggcctacaccctgccggtcgttcttgacgtgggcaccaataatcagcaactgctcgacgatccgttatacatgggctggcgccacccgcgtattaccgacgatgagtattaccagtttgttgacgatgttattcaggcgattaaagcccgctggccggatgtgctgctgcagttcgaagacttcgcgcagaaaaacgctatgccgctgcttaaccgctatcgccacgaaatctgctccttcaacgatgatatccagggcaccgcctcggtcaccgtcggtacgctgattgccgccagccgcggcgcgggcagtcagctgagcgagcagaaaattgtcttcctcggcgccggttccgcaggctgcggtatcgcggagcagatcgtcgcccagatccagcgcgaagggttaagcgaagaagaagcccgcaaacgcgtatttatggttgaccgtttcggtctgctcacggatgcgatgccaaatcttctgccgttccagagcaaactggtgcagaaacgcgaacacctgcaagagtgggacaccaccagtgacgtgctgtcgctgcttgacgtggtgcnaaatgtaaaaccggatatcctgatcggcgtctccgggcagcctgggctgttcaccgaagagattatccgcgagatgcataagcattgcccacgaccaatcgtgatgccgctgtcaaacccgacctcaagggtggaagccacgccgcaaaatatcctcagctggaccgacggagaagcgctggtcgctaccggcagtccgttcgctccggtaacgctcaaaggcaagcagtacgtcatcgcccagtgtaacaactcctatatcttcccggggatcggccttggggttatcgcttcaggcgcttcgcgcgtgaccgatgagatgctgatggccgccagcgaaacgctggcgaaacattcgccgctggtgaataacggtgaaggtccggttctgccggaactgaaagatatccagagcgtttcgcgcgctatcgcttttgcggtgggtaaaattgcccaggagcaaggcgtggcggtgaaaacctccgccgaagcgctgctgcaggcgatcgccgataacttctggcagccggaatatcgcaactatcgccggacgtcaatataa

SEQ ID NO: 6516 - protein, 565 aa, Klebsiella oxytoca
  misc_feature (379)..(379): Xaa can be any naturally occurring amino acid
MQFTHKKNRSLYIPYAGPVLLEFPLLNKGSAFSMEERSSFNLLGLLPEVVETIEEQAERAWIQYQGFKTEIDKHIYLRNIQDTNETLFYRLVGNHLDEMMPVIYTPTVGAACERFSEIYRRARGVFISYQNRNNLDDILQNVPNHNVKVIVMTDGERILGLGDQGIGGMGIPIGKLSLYTTCGGISPAYTLPVVLDVGTNNQQLLDDPLYMGWRHPRITDDEYYQFVDDVIQAIKARWPDVLLQFEDFAQKNAMPLLNRYRHEICSFNDDIQGTASVTVGTLIAASRGAGSQLSEQKIVFLGAGSAGCGIAEQIVAQIQREGLSEEEARKRVFMVDRFGLLTDAMPNLLPFQSKLVQKREHLQEWDTTSDVLSLLDVVXNVKPDILIGVSGQPGLFTEEIIREMHKHCPRPIVMPLSNPTSRVEATPQNILSWTDGEALVATGSPFAPVTLKGKQYVIAQCNNSYIFPGIGLGVIASGASRVTDEMLMAASETLAKHSPLVNNGEGPVLPELKDIQSVSRAIAFAVGKIAQEQGVAVKTSAEALLQAIADNFWQPEYRNYRRTSI

SEQ ID NO: 6517 - DNA, 600 bp, Klebsiella oxytoca
  misc_feature (325)..(325): n is a, c, g or t
atgcatctggcgaaaaccctcctggccgcaggccttctgctttctaccgccgttgaggcgcaaaacgtgctggattttccgcagccgaacaacaaccctgaagagttttacgccgtaaccgaaatcccggcgggcggcattatcaaatacgaaacggacgccaaaaccggctttctgatcgccgatcgtttccagtcgatgccggtggcctatccggctaactacggctcgctcactcaatcgctggcaggggatggcgatccgctggacgtggtgttttatacccgcgcgccgatggccccgggaacgctgattaagctgcgcncgattggcgtgctgaagatgattgatggcggcgagaaggacgacaaaatcattgccgttccggcaagtaaaatcgatccaacctacgatgacgtgattaacatcagcgatctgccgaaaattgagcaggagcgtctgcaggctttcttccgggtttacaaacagctgccggacggacgtaaaaaagtcgagctggacggctttaacgatgccgccgccgcgaaacaggaaatcaaagcggcatgggaagcgtggaaagagaaaaatccgcaataa

SEQ ID NO: 6518 - protein, 199 aa, Klebsiella oxytoca
  misc_feature (109)..(109): Xaa can be any naturally occurring amino acid
MHLAKTLLAAGLLLSTAVEAQNVLDFPQPNNNPEEFYAVTEIPAGGIIKYETDAKTGFLIADRFQSMPVAYPANYGSLTQSLAGDGDPLDVVFYTRAPMAPGTLIKLRXIGVLKMIDGGEKDDKIIAVPASKIDPTYDDVINISDLPKIEQERLQAFFRVYKQLPDGRKKVELDGFNDAAAAKQEIKAAWEAWKEKNPQ

SEQ ID NO: 6519 - DNA, 1605 bp, Klebsiella oxytoca
  misc_feature (371)..(371): n is a, c, g or t
atgaatgttttaaccgtagaaaacctacgcatcagctatcgttcgcagagtgaatggcgtgaagtcgtgcataacgtcagttttcaggtaaaacgcggcgaaatgctggcgttcgtcggcgaatccggctcgggcaaaaccactaccgcccaggcgataatgggtctgctggcggagaatgcccggcgcgacagcgggcgcatcagtattaacggtgaagacattagcggctggtcaggtaaacgcctcgacggcctgcgcggcgcgcgaattagcctggtgccccaggatccaggcaactccctcaatccggtgaaaaccatcggcgcgcaggtaggtgaaattctgcgcctccatcagaaacgcagcgncgcggaacgtaaaacgcaggtactggcgctgctggcgaaggttggactgagccacccggagcagcgcttcgatcaatatccgcaccaactttcaggcggcatgaagcaacgagtgctgattgccatcgccatcgctctgaaaccggatttaatcattgctgatgagccaaccagcgcccttgacgtgacggtacagaagcggatcctcgatctgctggataccctgcgccgggagtccggcacggcggtgctgttcgtcactcacgatctggcgctggcagccgagcgtgccgaccgcctgctggtctttcgtcatggcgaaattcaggagcaaggcgcgacccgcgatgtggtacggacgccgcagcatgcctatactcgccagctgctcagcgatcttcacggcccgacgctgaccatggctcccgccggcggtcgcgtgctggctacgccggcgattcgcgtcgacgacatcagcaagcgcttctcattaggccgggcgcatttgcaggcgctggacgccgtgagttttgaggttaagcgcggctgcacgcacgcgctggttggtgagtccggttccggtaaaacgacacttgcgcggatcctgctgggattcgaaaaggcggatagcggccagattgccatcgatggtattgatgccgggcatctcagtcgggaggcgctccgccagctacggcgtaaaattcagtttgtctatcagaacccctttgcctctcttgacccacggcaaacgctgtttgaaatcattgaagagccgttaaagaacttcgaccgcttcagcgccggaatacgacgccagcgcgtcgaaacggtcgccgctcgcgtggcgctcgctccggagctgctgtcgcgaaccgcccgtgagctatccggcgggcagcggcagcgggtggctatcgcccgcgccctaatccttgaaccgacgatccttgtcctcgatgaagcgacttcggcgctggacgttaccgtccaggcgcaaattctcgccttgctgcagcagttgcagcaacagctgggattgacctatctgtttatcacccacgatttggcgacggttcgccgtatcgcccacagcgtgacggtactgcgggcgggccaggttattgaacatggcgacgtcggccgactgttctgcgctccgcagcatgagtatacccgcgagcttattgccgctattccccacttttccccctcgaacaaggaggtcgcatga

SEQ ID NO: 6520 - protein, 534 aa, Klebsiella oxytoca
  misc_feature (124)..(124): Xaa can be any naturally occurring amino acid
MNVLTVENLRISYRSQSEWREVVHNVSFQVKRGEMLAFVGESGSGKTTTAQAIMGLLAENARRDSGRISINGEDISGWSGKRLDGLRGARISLVPQDPGNSLNPVKTIGAQVGEILRLHQKRSXAERKTQVLALLAKVGLSHPEQRFDQYPHQLSGGMKQRVLIAIAIALKPDLIIADEPTSALDVTVQKRILDLLDTLRRESGTAVLFVTHDLALAAERADRLLVFRHGEIQEQGATRDVVRTPQHAYTRQLLSDLHGPTLTMAPAGGRVLATPAIRVDDISKRFSLGRAHLQALDAVSFEVKRGCTHALVGESGSGKTTLARILLGFEKADSGQIAIDGIDAGHLSREALRQLRRKIQFVYQNPFASLDPRQTLFEIIEEPLKNFDRFSAGIRRQRVETVAARVALAPELLSRTARELSGGQRQRVAIARALILEPTILVLDEATSALDVTVQAQILALLQQLQQQLGLTYLFITHDLATVRRIAHSVTVLRAGQVIEHGDVGRLFCAPQHEYTRELIAAIPHFSPSNKEVA

SEQ ID NO: 6521 - DNA, 2412 bp, Klebsiella oxytoca
  misc_feature (359)..(359): n is a, c, g or t
atgaccaaccactgggttgatattaaaaacgccaatgtcgtggtggtgatgggcggtaacgccgccgaagcccatccggtgggattccgctgggcgatggaggcaaaaaacaacaatgatgcgacgctgattgtcgttgacccgcgctttacgcgtacggcgtcggtggccgatatttatgcgccgatccgttccggtaccgacattaccttcctgtcgggcgtgctgctgtacctgatcgaaaataacaaaatcaatgccgagtacgttaaacactataccaacgccaacctgctggtgcgcgacgattttgccttcgaagatggcctgttcagcggctacgatgccgaaaagcgtcngtacgataagtcttcgtggaactatcagttcgacgaaaatggcttcgcgatgcgcgatgaaacgctgcagcatccgcgctgcgtatggaacctgctgaagcagcacgtttcgcgctatacgccggaggtggtggagaacatctgcggtacgccaaaagcggacttcctgaaagtgtgcgaagtgctggcctcaaccagcgcggcggaccggaccaccactttcctctatgcgctgggctggacgcagcataccgtcggcgcgcagaacatccgcaccatggcgatgattcagctgctgctcggcaatatggggatggcgggaggcggggtcaacgcgctgcgcgggcactccaatatccaggggttaaccgatttaggcctgctttcgaccagcctgccgggctacctgacgctgccgtcggaacagcaggttgatctgcaaagctatctcgctgccaatacgccgaaggcgacgctgcccgaacaggtgaactactggagcaactacccgaagttcttcgtcagcctgatgaaatctttctacggcgacgcggcgcaaaaagagaacgactggggcttccactggctgccgaaatgggaccaggcttatgacgttatcaagtatttcaatatgatggataacggcaacgtcacgggctatatctgccagggattcaatccggtggcgtccttcccggacaaaaacaaggtggtccgcagcctgagtaagctgaagtacatggtggttatcgacccgctggtgaccgaaacctcgaccttctggcaaaaccacggcgagtcgaacgatgttgacccggcagcgattcagaccgaggtcttccgcctgccgtccacctgctttgccgaagaggatggttccatcgccaactccgggcgctggctacagtggcactggaagggccaggacgcgccgggcgaagcgcgcaacgacggcgaaattctggccgggatttaccaccgcctgcgcgagatgtatcgcaccgagggcggcaaaggcgtcgagccgctgctgaagatggggtggcactacaagcagccggatcgtccggaatcagaagaggtcgcgaaagagaacaacggctacgcgctggcggatctctacgacgctaacggcgcgccgctggcgaagaaaggccagctgttgaacagcttcgcgctgctgcgcgatgacggtaccaccgcgtcgtcttgttggatctataccggcagctggaccgagcagggcaatcagatggctaaccgcgataacgccgacccgtcaggtcttggcaatacgctcggctgggcatgggcgtggccgctcaaccggcgcgtgctgtacaaccgcgcgtcggcggatatgaacggcaagccgtgggatgcgaagcgaatgctgatccagtggaacggcagcaagtgggttggcaacgatattccggacttcaataccgcgccgccgggcagcaaaaccgggccgtttattatgcagccggaaggtctggggcgtctgtttgccctgaataagctggcggaaggtccgttcccggaacactacgaaccgatggaaacgccgcttggtaccaatccgctgcacccgagcgtggtctccagcccggtggtacgcctgtatgaagaagatgccctgcgtttaggtaagaaggacaaattcccgtacgtcggcaccacctatcgtctgaccgagcattttcatacctggaccaagcatgcgcggctcaatgcgattgcgcagccggagcagtttgtcgaaatcagcgaaggcctggcgaaagcgaaagggatcgccaatggcgatcgggtgacggtcagcagcatgcgcggctttattcgcgcggtggcggtggtgacgcgtcgtctgcaaacgctcaacgtcaacggtcagcaggtggaaaccgtcggtattccgctgcactggggttttgaaggagtggcccgcaaaggttacatcgccaataccctgacgccgaacgtcggggattccaactcgcagacgccggaatataaggcgtttctggtcaacatcgagaaagcgtaa

SEQ ID NO: 6522 - protein, 803 aa, Klebsiella oxytoca
  misc_feature (120)..(120): Xaa can be any naturally occurring amino acid
MTNHWVDIKNANVVVVMGGNAAEAHPVGFRWAMEAKNNNDATLIVVDPRFTRTASVADIYAPIRSGTDITFLSGVLLYLIENNKINAEYVKHYTNANLLVRDDFAFEDGLFSGYDAEKRXYDKSSWNYQFDENGFAMRDETLQHPRCVWNLLKQHVSRYTPEVVENICGTPKADFLKVCEVLASTSAADRTTTFLYALGWTQHTVGAQNIRTMAMIQLLLGNMGMAGGGVNALRGHSNIQGLTDLGLLSTSLPGYLTLPSEQQVDLQSYLAANTPKATLPEQVNYWSNYPKFFVSLMKSFYGDAAQKENDWGFHWLPKWDQAYDVIKYFNMMDNGNVTGYICQGFNPVASFPDKNKVVRSLSKLKYMVVIDPLVTETSTFWQNHGESNDVDPAAIQTEVFRLPSTCFAEEDGSIANSGRWLQWHWKGQDAPGEARNDGEILAGIYHRLREMYRTEGGKGVEPLLKMGWHYKQPDRPESEEVAKENNGYALADLYDANGAPLAKKGQLLNSFALLRDDGTTASSCWIYTGSWTEQGNQMANRDNADPSGLGNTLGWAWAWPLNRRVLYNRASADMNGKPWDAKRMLIQWNGSKWVGNDIPDFNTAPPGSKTGPFIMQPEGLGRLFALNKLAEGPFPEHYEPMETPLGTNPLHPSVVSSPVVRLYEEDALRLGKKDKFPYVGTTYRLTEHFHTWTKHARLNAIAQPEQFVEISEGLAKAKGIANGDRVTVSSMRGFIRAVAVVTRRLQTLNVNGQQVETVGIPLHWGFEGVARKGYIANTLTPNVGDSNSQTPEYKAFLVNIEKA

SEQ ID NO: 6523 - DNA, 1545 bp, Klebsiella oxytoca
  misc_feature (1357)..(1357): n is a, c, g or t
atgctcgcttatctcattcatcagaatgatgggagagccagcagcacgaaccacttcatggacattgacaggaaaatagcgacatcaatgaatacaaaacactctagcgtggcggagcagcacgctgccaaacgccactggctaaactcgcaggagtccggctaccacaaggcgatgggcaaccgtcaggtgcagatgattgccatcggcggcgcgattggtaccggcctgttcctcggcgcgggcgcgcgcctgcagatggcgggaccggcgctggcgctggtttatctggtctgcggcctcttctcgttctttattttacgcgcgcttggcgagctggtgcttcatcgcccttccagcggcagcttcgtctcctacgcccgcgagttcctcggcgaaaaagcggcttacgttgcgggctggatgtacttcatcaactgggcgatgaccgggattgtcgatatcaccgccgtcgcgctgtatatgcactactggggcgcgttcggcgacgttccgcagtgggtctttgccctcggcgcgctggcgatcgtcggcaccatgaatatgatcggcgtgaaatggttcgccgagatggagttctggttcgcgctggtcaaggtactggcaatcgtggcgtttctggtggtcgggactatttttcttggcaccggcaagccgctggatggcaatgccaccggtttccatctgatcaccgataacggcggtctgttcccgcacggcctgctgccggcgctggtgctggttcagggcgtggttttcgccttcgcttctattgaactggtaggtaccgccgccggcgagtgtaaagatccgcagaccatggtgccacgcgccatcaacagcgtcatctggcgtattggtctgttctacgttggctcggtgctgctgctggtgctgctgctgccgtggaatgcctatcaggccgggcagagcccgttcgtcaccttcttctcgaagctgggcgtgccgtatatcggcagcgtgatgaatattgtggtattaaccgccgcgctttccagcctcaactccggactgtactgcaccgggcgtattctgcgctccatgtcgatgggcggttcggcgcctaaatttatgtcgaaaatgagccgccatcacgtgccctatgccggtattctggcgacgctgggcgtctatgtcgttggggtattcctcaactacctggtgccttcgcaggtgtttgagatagtcctcaacgtcgcttcgctgggcatcatcgcctcgtggggatttattgtggtgtgccagatgcgcctgcgcaaggcgatcaaagaaggcaaggccgcagacgtcagcttcaagatgccgggagcgcctnttacttcctggctgaccctgctattcctgctgagcgtgctggtattaatggctttcgattacccgaatgggacttataccatcggttcgattccgctgattgccgttttgctggtcgccggctggtttggcgtacgcaagcgcgtgcatgatattcacagcactgcgccggatattgaaaaaccgtaa

SEQ ID NO: 6524 - protein, 514 aa, Klebsiella oxytoca
  misc_feature (453)..(453): Xaa can be any naturally occurring amino acid
MLAYLIHQNDGRASSTNHFMDIDRKIATSMNTKHSSVAEQHAAKRHWLNSQESGYHKAMGNRQVQMIAIGGAIGTGLFLGAGARLQMAGPALALVYLVCGLFSFFILRALGELVLHRPSSGSFVSYAREFLGEKAAYVAGWMYFINWAMTGIVDITAVALYMHYWGAFGDVPQWVFALGALAIVGTMNMIGVKWFAEMEFWFALVKVLAIVAFLVVGTIFLGTGKPLDGNATGFHLITDNGGLFPHGLLPALVLVQGVVFAFASIELVGTAAGECKDPQTMVPRAINSVIWRIGLFYVGSVLLLVLLLPWNAYQAGQSPFVTFFSKLGVPYIGSVMNIVVLTAALSSLNSGLYCTGRILRSMSMGGSAPKFMSKMSRHHVPYAGILATLGVYVVGVFLNYLVPSQVFEIVLNVASLGIIASWGFIVVCQMRLRKAIKEGKAADVSFKMPGAPXTSWLTLLFLLSVLVLMAFDYPNGTYTIGSIPLIAVLLVAGWFGVRKRVHDIHSTAPDIEKP

SEQ ID NO: 6525 - DNA, 1275 bp, Klebsiella oxytoca
  misc_feature (862)..(862): n is a, c, g or t
atggaaaagttatcttacgcttctgaaagtagtacatctccatggaccacctacctgcgtcaaatcgatcgcgtcgccccctacctcggcgatctggcctactggatcgaaacgctgcgccatccgaaacgcgcgctgatcgttgatatcccggtacaaatggacgacggaaccattcgccacttcgaaggctaccgcgtccagcacaacctctcacgcggtccgggtaaaggcggcgtgcgttaccatccggatgtggacctgaatgaagtcatggccctctcagcctggatgaccatcaagtgtgcggcagtcaatattccctacggcggcgccaaaggcggtatccgcgtcgatccgttctctttatcagaaggtgaactggaacgtctgacccgtcgctacaccagcgagatcggcattattatcgggccgcaaaaagatattccggcgccggacgtcggcaccaacggtaaagtgatggcctggatgatggacacctattccatgaaccacggcaccactatcaccggcgtggtcaccggtaaaccgattcatctcggcggttctctgggccgcgaaaaggccacgggacgcggcgtcttcgtcactggtcgcgaagtggcccgccgcagcggtatcgaaatcgaaggcgcgaaggtcgcgctgcaagggtttggtaacgtaggcagtgaagcggcccgcctgttcgctggcgtcggcgcgcggattgtggtcattcaggaccataccgccacgctgtataacgaaggcggtatcgatatggccgcgctgaccgcctggcaggccgagaacaagcaaatagccggtttccccggcgcccgcgaaattgacaaagaancgttctggacgacgccgatggatattctgatcccggcggcgctggaaggtcaaattacgcgcgaacgcgcggaaaccctcagctgcaaactggtgcttgaaggcgccaacggcccgacctatccggaagcggacgacgtgctggccgaacgcggcatcgtggtggtgccggacgtcatttgtaatgccggcggcgtcaccgtgagctactttgaatgggtgcaggatatggccagcttcttctggagcgaagaagagatcaacgccaaaatggaccgcattatgaccgatgcgatcgttcacgtttacgataaagcggtggaaaaagcgtgctctttacgtactgccgcctatatcgtggcctgtgagcgaattctgatggcgcgtaaagatcgcggtatttatccgggataa

SEQ ID NO: 6526 - protein, 424 aa, Klebsiella oxytoca
  misc_feature (288)..(288): Xaa can be any naturally occurring amino acid
MEKLSYASESSTSPWTTYLRQIDRVAPYLGDLAYWIETLRHPKRALIVDIPVQMDDGTIRHFEGYRVQHNLSRGPGKGGVRYHPDVDLNEVMALSAWMTIKCAAVNIPYGGAKGGIRVDPFSLSEGELERLTRRYTSEIGIIIGPQKDIPAPDVGTNGKVMAWMMDTYSMNHGTTITGVVTGKPIHLGGSLGREKATGRGVFVTGREVARRSGIEIEGAKVALQGFGNVGSEAARLFAGVGARIVVIQDHTATLYNEGGIDMAALTAWQAENKQIAGFPGAREIDKEXFWTTPMDILIPAALEGQITRERAETLSCKLVLEGANGPTYPEADDVLAERGIVVVPDVICNAGGVTVSYFEWVQDMASFFWSEEEINAKMDRIMTDAIVHVYDKAVEKACSLRTAAYIVACERILMARKDRGIYPG

SEQ ID NO: 6527 - DNA, 2046 bp, Klebsiella oxytoca
  misc_feature (734)..(734): n is a, c, g or t
atgcagcagttagccagctacttgtccggcacgtggcagaccggccggggccacgcgcgcactatccatcacgccatcagcggcgaagcgctatgggaagtcaccagcgagggtctggatatggcgcaggcgcgacgcttcgcgattgagcgcggcggcaaagcgctggaggcgatgacctttattgagcgcagcgcaatgctgaaggcggtcgccagatatttgctggagcagaaggcggcgttgtatacaatctctgccgaaaccggcgctacccgtgccgacagctgggtggatatcgaagggggcattggcacccttttcacctacgccagccttggcagccgcgagctgccggacgataccctgtggccggaagatgagctgattccgctatcaaaacagggaggcttcgccgcccgccacgtgctgacctcgaagtccggcgtggcagtgcatatcaacgcttttaactttccctgctggggcatgctggaaaagctggcgcccacctggcttgccgggatgcccgccatcatcaaaccggctaccgctaccgcgcagctgactcaggcgatggttaaaatgattgtcgatagcggactggtgccggtgggcgcaatcagcctgatctgcggtggcgcgggcgatctgctcgaccatctcgatagccaggatgttgtcacctttaccggctcggcccataccggacagcagctgcgggtgcatcccancctggtcgcgaagtccattcccttcaccatggaagcggattcgctaaactgttgcgtactcggtgacgacgtcacgccggagcagccggagttcgcgctgttcattcgcgaagtggtacgagaaatgacggcgaaggccgggcaaaagtgcaccgccatccgccgtattatcgtgccgcaggcacaggttaaagcggtgagcgacgcgctggttgcgcgcctgcaaaaagtggcgttcggtgacccggcgcaggaaggcgtgaagatgggcgcgttggtgaaccacgaacagcgtcaggacgtacaggataatgtaaaccgtctgatcgaagccggatgtgaagtgttgctgggtggtcgcgcggatctcaacgccgcgggcgcattcttcccgccgacgctgctgttctgcccgcagccggatgagaccccggcggtacacgccattgaagcgttcggccccgtggctactctgatgccctatcagagcgtcgagcatgcgatggccctggcgcgggccggtgaaggtagcctggcaggcacgctggtcaccgccagcggaaaactggcgcgcgcgtttattctcggcgccgcccgcgcccacgggcgtattcagatactgaacgaagagtcttccgcagagtccaccggccacggctccccgctgccgcagctggtacacggcggtccggggcgcgccggcggcggtgaagagctgggcggcctgcgggcggtgaagcactatatgcagcgcaccgcgattcagggtagcccgacgatgctcgccgccatcggccagcagtgggtgcgcggcgcgcaggtggtggaagaccgcattcacccgttccgcaaatatttcgaggagatccagccgggcgacagcctgttgactccgcgccgcacgctgaccgaggcggatatcgtcaacttcgcctgcctgagcggcgatcacttttacgcccatatggataagattgccgcggcggagtcgattttcggcgaacgcgtggtgcacggctacttcctgatttccgccgctgccgggctgtttgttgacgccggggtcggcccggtgatcgccaactacgggatggagaatctgcgcttcatcgagccggtgaagccgggcgataccatccaggtacgcctgacctgcaagcgtaaaacggtgaaacgtcagcgcaacgctgaagagaaagcgaccggcgtcgttgagtgggcggtagagatttttaatcagcaccagcaggcggtcgccctctactccattctgaccctggtggcccgccagcagggggattttgccgggtaa

SEQ ID NO: 6528 - protein, 681 aa, Klebsiella oxytoca
  misc_feature (245)..(245): Xaa can be any naturally occurring amino acid
MQQLASYLSGTWQTGRGHARTIHHAISGEALWEVTSEGLDMAQARRFAIERGGKALEAMTFIERSAMLKAVARYLLEQKAALYTISAETGATRADSWVDIEGGIGTLFTYASLGSRELPDDTLWPEDELIPLSKQGGFAARHVLTSKSGVAVHINAFNFPCWGMLEKLAPTWLAGMPAIIKPATATAQLTQAMVKMIVDSGLVPVGAISLICGGAGDLLDHLDSQDVVTFTGSAHTGQQLRVHPXLVAKSIPFTMEADSLNCCVLGDDVTPEQPEFALFIREVVREMTAKAGQKCTAIRRIIVPQAQVKAVSDALVARLQKVAFGDPAQEGVKMGALVNHEQRQDVQDNVNRLIEAGCEVLLGGRADLNAAGAFFPPTLLFCPQPDETPAVHAIEAFGPVATLMPYQSVEHAMALARAGEGSLAGTLVTASGKLARAFILGAARAHGRIQILNEESSAESTGHGSPLPQLVHGGPGRAGGGEELGGLRAVKHYMQRTAIQGSPTMLAAIGQQWVRGAQVVEDRIHPFRKYFEEIQPGDSLLTPRRTLTEADIVNFACLSGDHFYAHMDKIAAAESIFGERVVHGYFLISAAAGLFVDAGVGPVIANYGMENLRFIEPVKPGDTIQVRLTCKRKTVKRQRNAEEKATGVVEWAVEIFNQHQQAVALYSILTLVARQQGDFAG

SEQ ID NO: 6529 - DNA, 597 bp, Klebsiella oxytoca
  misc_feature (113)..(113): n is a, c, g or t
atgatggaattcgtgtatccgcatacccatctggttgcgggagtcgatgaagtcggacgcggtccgctggttggcgcggtggtgacggctgcggtgatactcgatccggccanaccgattgtgggtcttaatgactcgaaaaagctcagcgaaaaacggcgcctggcgctatttgacgagatcaaagaaaaagcgctgtgctggagcctgggtcgggcggagccgcatgaaatcgatgaactgaatattttacacgcgaccatgctggccatgcagcgcgccgtcgcgggtttgcgcgtctccccggaatttgttcttattgatggtaaccgctgtccgccgctgcccgtaccttcgctggcggttgtcaaaggcgatagccgggtggcggaaatcagcgccgcatcgattctggcgaaagtgacgcgcgatgcggaaatggccgcgctggatcggcaatttccacagtacggctttgcacaacataaaggttatcccaccgcttttcatctgcaaaaactgctggaacatggcgttatcgagcaataccggcgcagttttggcccggtgaaacgcgcgctgggcctggcgtcctga

SEQ ID NO: 6530 - protein, 198 aa, Klebsiella oxytoca
  misc_feature (38)..(38): Xaa can be any naturally occurring amino acid
MMEFVYPHTHLVAGVDEVGRGPLVGAVVTAAVILDPAXPIVGLNDSKKLSEKRRLALFDEIKEKALCWSLGRAEPHEIDELNILHATMLAMQRAVAGLRVSPEFVLIDGNRCPPLPVPSLAVVKGDSRVAEISAASILAKVTRDAEMAALDRQFPQYGFAQHKGYPTAFHLQKLLEHGVIEQYRRSFGPVKRALGLAS

SEQ ID NO: 6531 - DNA, 2430 bp, Klebsiella oxytoca
  misc_feature (1951)..(1951): n is a, c, g or t
gtgtcctcattgccggttgccgccgtcctccctgaacttctctctgccctgcagcatgcgccgcaggttttgcttaacgcgccaaccggcgccgggaaatccacctggctgccgctgcaaattctcgccgaaggtaaaatcaacggacgcataatcctgctggagccgcggcggctggccgcgcgtaacgtggcgcagcggctggcggaactgctgggagaaaagcccggcgagacggtgggctatcgcatgcgcgcggagagctgcgtcgggccgaacacgcgtctcgaagtggtgaccgaaggtattttaacgcggatgatccagcgcgatcctgagctgagcggcgtggggctggcgatccttgatgaattccacgaacgcagcctgcaggcggatctggcgctggcgctgttgctcgacgtccagcagggactgcgcgacgatcttaagctgctgattatgtcggcgacgctggacaatgaacgcctgcagaagctgctgccggaggcgccggttatcgtttccgaagggcgcgcgtttccggttgaacggcgttttttgccgttgccgactcatcagcgttttgacgaggcggtggcgatagccgccgcagagctgctgcgtagcgagaacggctcaatgctgctgtttctgcccggggtaggagaaattcagcgcgtgcaggagcggctggcggagcgggtggcgagcgatgttgtgctgtgcccgctgtacggcgcgttgccgctgagcgagcagcgtaaggcgatactgcctgcgccagccgggatgcgcaaagtggtgctggcaaccaacatcgccgaaaccagtctgaccatcgaggggattcggctggtggtggatagcgctcaggagcgagtcgcgcgctttgacgcccgcaccgggctcacgcgcctggtgacgcagcgcatcagccaggcctcaatgacccagcgcgccggtcgagccgggcgtctggagccgggtatctgcctgcatctgctggcaaaggagcaggccgagcgcgcggcggcgcaggacgacccggaaatcctgcaaagcgatttgtcgtcgctgctgctggagctattgcagtggggatgtcaggacccggcccagctcagctggctggatctgccgcctgcgaccaacctggcggcggcccggcgtctgctcactgacctttctgcgctggaaggtgaccggctgtcggcgcacgggcgcaaaatggcggcgttaggtaacgatccgcgtctggcggcaatgctgacggccgcggaggatgccgatggcgccgccacggcggctaagctggcggcgatccttgaagagccgccgcgcggcggcaatagcgatctcagcgcggcgtttgcccgtcagcagggcaactggcagcagcgggcgcagcagctgatgaaaaggctggcggttcgcggcggtcagcccgacgccgacagcatcgcggcgctgctggcctccgcttttgccgaccgtatcgcccatcgtcgcggtcaggaggggcgctaccagctggctaacgggatgggggcgatgcttgacgccgatgatgccctgagccgccacgaatggctgattgcgccgctgctgctgcaggggagcgcatcgccagatgcgcggatcctgctggcgctgccagtcgatattcacgcgctgattgagcagtgtccggcgctggtccggcgttccgatatcgtcgagtgggatgaggcgccaggcacgctgaaggcctggcggcgcacctgtatcggacgcctggtcatcaagacccagccgctggcgaagccagcggaagaggagctgcatcaggcgatgcttaacgggatccgcgagaaggggctgaacgtgctcaactggacgccggaggcggagcaactacgtctgcggctgcactgcgcggcgcagtggctgccggaggaggcgtggccgnccgttgatgaggcgtcgctgctggcctcgcttgaacggtggctgctgccgcagatggcgggcgtccattcgctgcgggctctgaaggcgctggacgtgcgtcaggcgctgcaaaactggctgccgtggccgctgcgccagaagctggacagcgagctgcccacgcattatacggtgccgaccggtagccgcattgcgattcgctatcacgatgaaaacccgccggcgctggcggtgcgaatgcaggagatgtttggcgaggcgaccactccgactatcgcccaggggcgggtgccgctggtgctggagctgctttcgccggcgcagcgcccgctgcagatcacccgtgatttaggcgcgttctggcaggggagctaccgcgaggtacaaaaagagatgaaagggcgctatccgaagcacgtctggcccgacgatccggccaataccgccccgacccgccgcaccaaaaagtattcgtag

SEQ ID NO: 6532 - protein, 809 aa, Klebsiella oxytoca
  misc_feature (651)..(651): Xaa can be any naturally occurring amino acid
MSSLPVAAVLPELLSALQHAPQVLLNAPTGAGKSTWLPLQILAEGKINGRIILLEPRRLAARNVAQRLAELLGEKPGETVGYRMRAESCVGPNTRLEVVTEGILTRMIQRDPELSGVGLAILDEFHERSLQADLALALLLDVQQGLRDDLKLLIMSATLDNERLQKLLPEAPVIVSEGRAFPVERRFLPLPTHQRFDEAVAIAAAELLRSENGSMLLFLPGVGEIQRVQERLAERVASDVVLCPLYGALPLSEQRKAILPAPAGMRKVVLATNIAETSLTIEGIRLVVDSAQERVARFDARTGLTRLVTQRISQASMTQRAGRAGRLEPGICLHLLAKEQAERAAAQDDPEILQSDLSSLLLELLQWGCQDPAQLSWLDLPPATNLAAARRLLTDLSALEGDRLSAHGRKMAALGNDPRLAAMLTAAEDADGAATAAKLAAILEEPPRGGNSDLSAAFARQQGNWQQRAQQLMKRLAVRGGQPDADSIAALLASAFADRIAHRRGQEGRYQLANGMGAMLDADDALSRHEWLIAPLLLQGSASPDARILLALPVDIHALIEQCPALVRRSDIVEWDEAPGTLKAWRRTCIGRLVIKTQPLAKPAEEELHQAMLNGIREKGLNVLNWTPEAEQLRLRLHCAAQWLPEEAWPXVDEASLLASLERWLLPQMAGVHSLRALKALDVRQALQNWLPWPLRQKLDSELPTHYTVPTGSRIAIRYHDENPPALAVRMQEMFGEATTPTIAQGRVPLVLELLSPAQRPLQITRDLGAFWQGSYREVQKEMKGRYPKHVWPDDPANTAPTRRTKKYS

SEQ ID NO: 6533 - DNA, 537 bp, Klebsiella oxytoca
  misc_feature (430)..(430): n is a, c, g or t
atgtccgagccgaaaaggctgtttttcgccattgaacttcctggagaagttcagcagcagatcgttcactggcgcgccgccagctttcccgaggatgcgggtcgaccggtggcggcggctaacctccatctgacgctggcctttcttggcgaagtgagcgcggacaagcagcgggcgctgtctgcaatggccggacggatccgccagccgggctttaccctgacgcttaacgatgccgggcagtggctacgttcgcgggtggtgtggctgggtactcgtcagccgccgcgcggggttttgcaattagcgaatatgctgcgcgcccaggccgcccgcagcggctgctatcagagcccgcagccgtttcatccgcatatcaccctgctgcgcgacgcgcgccacgcggtgcctattccgccgcccggatttngctgggcgtttgcggtcaacgaatttgttctctaccaatccagctttagccgcggacgcacgcgctatcaggcgctggaacgttaccctttcgacaaggaaagctga

SEQ ID NO: 6534 - protein, 178 aa, Klebsiella oxytoca
  misc_feature (144)..(144): Xaa can be any naturally occurring amino acid
MSEPKRLFFAIELPGEVQQQIVHWRAASFPEDAGRPVAAANLHLTLAFLGEVSADKQRALSAMAGRIRQPGFTLTLNDAGQWLRSRVVWLGTRQPPRGVLQLANMLRAQAARSGCYQSPQPFHPHITLLRDARHAVPIPPPGFXWAFAVNEFVLYQSSFSRGRTRYQALERYPFDKES

SEQ ID NO: 6535 - DNA, 864 bp, Klebsiella pneumoniae
  misc_feature (841)..(841): n is a, c, g or t
atggcagaacgtattactggacacaccgagctgattggcctgattgcgaccccgattcgtcacagcatgtcgccgactatgcataacgaagcctttgcccatctgggactggactacgtttatctggcgttcgaagtaggtaatgaagagctgaaagatgtcgtacagggttttcgtgcattaaaactgcgcggctgtaacgtctccatgccgaacaaaacggagatttgccagtatctggacaaactctcgccggcggcagaactggttggcgcggtgaataccgtggtgaacgacaatggcgtcctgaccggccatatcaccgatggcaccggatatatgcgcgcgctcaaagaagaaggcattgatatcatcggcaaaaagatgaccgttctgggcgctggcggtgcggcaaccgcgctctgcgttcaggccgcgcttgatggcgtcaaagcgatctccatcttcaaccgcaaagataaattcttcgccaacgcagaacagaccgttgccaaaatccgtaataacaccaactgcgagatccacctgttcgatctggacgatcatgacaaactgcgcgcggaaatcgacagcagcgtcattctgaccaacgccaccggcgtggggatgaaaccgtttgaaggccagatgctgctgcctgacgacagcttcctgcgcccggacctgatcgtttctgacgtggtctacaacccgcgcaaaacttatctgctggaagtggctgagaaaaaaggctgccgcaccatcaacggtctggggatgatgctctggcaaggcgcgcgcgcttttgaaatctggacaggcaaagaaatgccggttgaanacgtcaaaaatatcctgttctaa

SEQ ID NO: 6536 - protein, 287 aa, Klebsiella pneumoniae
  misc_feature (281)..(281): Xaa can be any naturally occurring amino acid
MAERITGHTELIGLIATPIRHSMSPTMHNEAFAHLGLDYVYLAFEVGNEELKDVVQGFRALKLRGCNVSMPNKTEICQYLDKLSPAAELVGAVNTVVNDNGVLTGHITDGTGYMRALKEEGIDIIGKKMTVLGAGGAATALCVQAALDGVKAISIFNRKDKFFANAEQTVAKIRNNTNCEIHLFDLDDHDKLRAEIDSSVILTNATGVGMKPFEGQMLLPDDSFLRPDLIVSDVVYNPRKTYLLEVAEKKGCRTINGLGMMLWQGARAFEIWTGKEMPVEXVKNILF

SEQ ID NO: 6537 - DNA, 2352 bp, Klebsiella oxytoca
  misc_feature (2342)..(2342): n is a, c, g or t
gtgaagattaccactactcttacgccgctggcctgcgccctactgctaagcttttccgcccacgcgctgaccgcggatgactttaaaaatgttatcaaccgcagcggcgcgccgcaggcgatgcaggattttgataacgatgaccaccagcgcttcaacccgtttttcgatttgggcgcatggcatgggcatctgctgcctgatggtccggccaccatgggcggatttcccggacccgcgctgctcactgaggagtacatcaactttatggcgaccaatttcgatcgcctgacggtataccagaacggcaaaaaagtcgccttcaccctgcaggcctggagcctgcccggcgcgctggtgcaaaagctctccgcggccggcgtacaggtcgagatgaccctgcgctttgccagcgcgcacacctctttactggagactaaaatcaccagtagcagcccgcttaagctggtctgggacggcgagttgctggagaaactctccgccaaagaggggaaaccgcagtcaacgcaaaccatcgaccaggctttcccggactatcagcgccgcctgagcgcgacccacgacggcctgaccgtcagcttcggcaaagtccgctccgcatcggatttaatgacctccggcgaatcgcagtatcagatccatcgctccctgccgacggtcacccaaatcgacggccatcgattcaccagcagcgcgcaaatcaacggctcgaccacgctctataccacctactcgcacctgctgaacgccgagcaggttcggctcgagaaagcgcaaatccgcgatattcttgcgcgaccggtacactacctgcgcgcttccgaggcgcgctggaacggctatctgcaaaaggggctgaccaatcctgatgctacggcgcagcaaacccgggtggcggtaaaagcgatcgaaacccttaacggtaactggcgcgcgccgggcggcgccgttaagcacaacaccgtcacgccgtcggtaaccgggcgctggttctcaggcaaccagacctggccgtgggatacctggaagcaggcctacgccatggcccacttcaacccggagatcgcgaaagagaacatccgtgccgtcttctcctggcagattgccgccgacgataaagtgcggccgcaggatgccgggttcattccggatctgatcgcctggaacctgagcccggaacgcggcggcgacggcagcaactggaacgagcgaaataccaaaccgagcctggcggcctggtcggtgatggaagtctataacgttacgaaagataaaacctggctggcggagatgtatccgaagctagtggcctaccatgactggtggctgcgcaaccgcgaccacaacggcaacggcgtgccggagtacggcgcgacccgcgataaagcgcacaacaccgccgatggcgcgatgctgtttaccgtgaaaaagggcgataaagaacggacgctttccggcctgaaaacctacgagcaggtgacggcgaaaggcgattacgacagcctggagatcccggcgcaggtggccgcctcctgggagtcggggcgcgacgacgcggcggttttcggctttatcgataaagatcagttggataaatacatcgctggcggcggcaagcgtagcgactggacggtgaaatttgctgaaaaccgggataaaagcggcaatctgctcggctattcgctgctgcaggagtcggtcgatcaggccagctacatgtacagcgacaaccactatctggcggagatggcggcccttctcggcaagccggaggaggcaaaacgctaccgggcgctggcgaaaaagctcgccgactatatcaacacctgcatgttcgacccgcagagcaaattctattacgacattcgcattgaagcgcagccgctggcaaacggctgcgccggtaggccgatcgtcgagcgcggcaaaggcccggagggctggtcgccgcttttcaacggcgcggccactcaggcgcatgccgatgacgtcatttcggtgatgctggacgccaaagagttcaacactttcgtaccgctgggtaccgccgcattaacgaatccggcgtttggcgcggatatttactggcgcggccgcgtgtgggtggaccagttctggttcggcctgaaggggatggagcgctacggccaccgcgaagaggcgctgcagctggcggacgccttcttcaggcacgcccgggggctcacctccgatggcccgattcaggagaactacaatccgctcaccggcgctcagcagggcgcgccgaacttctcctggagcgcggcgcatctgtacatgctgtataacgagtttttccntaaaccatag

SEQ ID NO: 6538 - protein, 783 aa, Klebsiella oxytoca
  misc_feature (781)..(781): Xaa can be any naturally occurring amino acid
MKITTTLTPLACALLLSFSAHALTADDFKNVINRSGAPQAMQDFDNDDHQRFNPFFDLGAWHGHLLPDGPATMGGFPGPALLTEEYINFMATNFDRLTVYQNGKKVAFTLQAWSLPGALVQKLSAAGVQVEMTLRFASAHTSLLETKITSSSPLKLVWDGELLEKLSAKEGKPQSTQTIDQAFPDYQRRLSATHDGLTVSFGKVRSASDLMTSGESQYQIHRSLPTVTQIDGHRFTSSAQINGSTTLYTTYSHLLNAEQVRLEKAQIRDILARPVHYLRASEARWNGYLQKGLTNPDATAQQTRVAVKAIETLNGNWRAPGGAVKHNTVTPSVTGRWFSGNQTWPWDTWKQAYAMAHFNPEIAKENIRAVFSWQIAADDKVRPQDAGFIPDLIAWNLSPERGGDGSNWNERNTKPSLAAWSVMEVYNVTKDKTWLAEMYPKLVAYHDWWLRNRDHNGNGVPEYGATRDKAHNTADGAMLFTVKKGDKERTLSGLKTYEQVTAKGDYDSLEIPAQVAASWESGRDDAAVFGFIDKDQLDKYIAGGGKRSDWTVKFAENRDKSGNLLGYSLLQESVDQASYMYSDNHYLAEMAALLGKPEEAKRYRALAKKLADYINTCMFDPQSKFYYDIRIEAQPLANGCAGRPIVERGKGPEGWSPLFNGAATQAHADDVISVMLDAKEFNTFVPLGTAALTNPAFGADIYWRGRVWVDQFWFGLKGMERYGHREEALQLADAFFRHARGLTSDGPIQENYNPLTGAQQGAPNFSWSAAHLYMLYNEFFXKP

SEQ ID NO: 6539 - DNA, 792 bp, Klebsiella oxytoca
  misc_feature (10)..(10): n is a, c, g or t
atgtcccgtntccgcatgcccgcgctatttttaggccatggcagcccgatgaacgtgctggaagataacatctatactcgcgcctggcggcatctgggcgagactttaccgcggccgaaagccatcgtggttatctccgctcactggttcactcgcggtacgggagtgacggcgatggaagcgccgaaaacgattcatgattttggcggttttccacaggcgctatacgatatgcattatccggctccgggttcacctgaactggcccagcgcctggttgagcttctggcgccggtgccggtgactctggataaagaagcctggggctttgaccatggttcatggggcgtgttgattaaaatgtatcccgacgccgatattccgatggtgcagctaagtattgatagcacgaaacccgccgcatggcatttcgaaatggggcgtaagctggctcagctgcgcgatgaaggcattatgctggtggcaagcggcaacgtggtgcataacctgcgcaccgcacgctggcacggcgagaatacggcctatccctgggcggagtcgtttaataactacgtgaaggcgaacctggcatggaaaggccccgtggcggaacatccgctggtgaattacctgacgcatgaaggcggatcgttatctaacccaacggccgatcacttcctgccgctgctgtacgtactgggggcctgggacggcgaggagccgattacgatcccggtagaaggaatggaaatgggatccctgagcatgctgtcagtggtgattggcgcttga

SEQ ID NO: 6540 - protein, 263 aa, Klebsiella oxytoca
  misc_feature (4)..(4): Xaa can be any naturally occurring amino acid
MSRXRMPALFLGHGSPMNVLEDNIYTRAWRHLGETLPRPKAIVVISAHWFTRGTGVTAMEAPKTIHDFGGFPQALYDMHYPAPGSPELAQRLVELLAPVPVTLDKEAWGFDHGSWGVLIKMYPDADIPMVQLSIDSTKPAAWHFEMGRKLAQLRDEGIMLVASGNVVHNLRTARWHGENTAYPWAESFNNYVKANLAWKGPVAEHPLVNYLTHEGGSLSNPTADHFLPLLYVLGAWDGEEPITIPVEGMEMGSLSMLSVVIGA

SEQ ID NO: 6541 - DNA, 1896 bp, Klebsiella oxytoca
  misc_feature (1261)..(1261): n is a, c, g or t
atgacgcaatcttcatataacgctgatgccattgaggtactcaccgggctagagccggttcgccgccgtccgggaatgtacacggataccacacgaccaaaccatcttggtcaggaagttattgataacagcgtggatgaggctctggccggtcacgcgaaacgcgtggaggtcattctccatgccgatcagtcgctggaagttatcgacgatggacgcggaatgccggtggatatccaccctgaagagggggtgccggcagttgaactgattctttgccgcctgcacgcgggagggaagttctccaataagaactaccagttctccggcggcctgcacggcgtcgggatttccgtggtcaacgccttatcgaaacgcgttgaagtgaatgtgcgccgcgacggtcaggtctatagcatcgcctttgaaaacggcgacaaagtggaagatctccacgtgaccggcacctgcggtaagcgcaataccgggaccagcgttcatttctggccggatgaaagcttttttgatagcccacgtttttccgtctcgcgcctttcgcatttgttaaaagccaaggccgttctttgcccgggcgtagagattgttttccgcgatctggtcaacgacagcgagcagcgctggtgctacgctgatggcctgaccgactatcttagcgaagcggttaacggcctgcctctgctgccggaaaaaccgttcgtcggcaccttctctggcgataccgaagcggtcgactgggcgctgctgtggctgccggaaggcggcgagctgctgaccgaaagctacgtcaacctgattcctaccatgcagggcggaacccacgttaacggcctgcgccagggcttactggacgccatgcgcgagttttgcgaataccgaaacatcctgccgcgcggcgtgaagctgtcggcggaagatatctgggagcgctgcgcctacgtactctccgtgaagatgcaggatccgcagtttgccgggcaaaccaaagagcgcctctcttcacgccagtgcgccgcgtttgtttccggagtcgtcaaagatgccttcagcctgtggctaaaccagaacgtccagtcggcagagctgctggcggaaatggcgatctccagcgcccagcgtcgcctgcgcgcggcgaaaaaagtggtgcgcaaaaagctaaccagcggtccggcgctgcccggcaagctggcggactgcaccgcccaggatttgaaccgaaccgaactgttccttgtggaagggnattcggcgggcggttctgccaagcaggcgcgcgatcgcgaatatcaggcgatcatgccgctgaaaggtaaaatccttaacacctgggaagtctcttccgatgaagtactggcttcacaggaagtgcatgacatttctgtcgccatcggtatcgacccggatagcgacgacctgagccagctgcgctacggcaagatttgtattctggcggatgccgactccgacggtctgcacattgcaaccctgctgtgcgcgctgttcgtcagacacttccgtaatctggttaaacacggccatgtttacgtggcgctgccgccgctataccgtatcgacctcggtaaagaggtgtattacgcgctgacggaagaagagaaaaccggcgtgctggaacagcttaagcggaagaagggtaagccaaacgtacagcgctttaaagggctgggcgagatgaacccgatgcagctgcgtgagacgacgctggatccgaatacccgccgtctggtgcagctgattatcaacgatgaggacgaacagcagacgactgccatgatggacatgctgttagcgaagaagcgttctgaagatcggcgtaactggctacaagagaagggcgatctggctgagctggacgggtaa

SEQ ID NO: 6542 - protein, 631 aa, Klebsiella oxytoca
  misc_feature (421)..(421): Xaa can be any naturally occurring amino acid
MTQSSYNADAIEVLTGLEPVRRRPGMYTDTTRPNHLGQEVIDNSVDEALAGHAKRVEVILHADQSLEVIDDGRGMPVDIHPEEGVPAVELILCRLHAGGKFSNKNYQFSGGLHGVGISVVNALSKRVEVNVRRDGQVYSIAFENGDKVEDLHVTGTCGKRNTGTSVHFWPDESFFDSPRFSVSRLSHLLKAKAVLCPGVEIVFRDLVNDSEQRWCYADGLTDYLSEAVNGLPLLPEKPFVGTFSGDTEAVDWALLWLPEGGELLTESYVNLIPTMQGGTHVNGLRQGLLDAMREFCEYRNILPRGVKLSAEDIWERCAYVLSVKMQDPQFAGQTKERLSSRQCAAFVSGVVKDAFSLWLNQNVQSAELLAEMAISSAQRRLRAAKKVVRKKLTSGPALPGKLADCTAQDLNRTELFLVEGXSAGGSAKQARDREYQAIMPLKGKILNTWEVSSDEVLASQEVHDISVAIGIDPDSDDLSQLRYGKICILADADSDGLHIATLLCALFVRHFRNLVKHGHVYVALPPLYRIDLGKEVYYALTEEEKTGVLEQLKRKKGKPNVQRFKGLGEMNPMQLRETTLDPNTRRLVQLIINDEDEQQTTAMMDMLLAKKRSEDRRNWLQEKGDLAELDG

SEQ ID NO: 6543 - DNA, 2259 bp, Klebsiella pneumoniae
  misc_feature (239)..(239): n is a, c, g or t
atgagcgatatggcagagcgccttgcgctgcatgaatttacggaaaacgcctaccttaactactccatgtacgtcatcatggacagggcgctgccgtttattggcgatggcctgaagccggtccagcgtcgcatcgtctatgcgatgtctgaactgggtctgaacgccagcgcgaagttcaaaaagtccgcccgcaccgtcggtgacgtgctgggtaaataccatccccacggcgacancgcgtgctatgaagccatggtgctgatggctcagcccttctcctaccgctatccgctggttgacggtcagggaaactggggggcgccggacgatcctaaatccttcgccgcaatgcgttataccgaatcccgtttgtcgaagtatgctgaactgctgctgagcgaactggggcaaggcaccgttgactgggtaccaaacttcgacggcactttgcaggagccgaagatgctgcctgcgcgcctgcccaatattctgttaaacggtactaccggcattgccgttgggatggcgacggacattccgccgcacaacctgcgtgaagtggcccgggcggccattaccctgattgaaaagccgcaaacttcgctggatgacctgctggatatcgtgcaggggccggattacccgaccgaagcggaaatcattaccccccgtgccgaaatccgcaaaatctaccagaatggccgcggttcggtgcggatgcgcgcggtatgggccaaagaagacggcgcggtggtgattagcgcgctgccgcatcaggtttccggcgcccgcgtgcttgagcagatcgccgcccagatgcgcaacaaaaagctgccgatggtggatgatctgcgcgacgagtcggatcacgaaaacccgactcgcctggtgatcgtcccgcgctctaaccgcgtcgatatggagcaggtgatgaaccacctgttcgcgacgaccgatctggaaaagagctatcgtatcaacctgaatatgatcgggctcgataaccgtccagcggttaaaaacctgctggaaatcctctcggaatggctgaccttccgtcgcgataccgtgcgccgtcgtctcagctaccgtctggaaaaggtcctcaagcgcctgcatattcttgaaggtttgctggtggcgtttctgaatatcgatgaagttatcgagatcattcgtcacgaagatgagccgaaaccggcgctgatgtcgcgcttcggcctcagcgagacccaggcggaagcgattctggagttaaaactgcgccatctcgccaaactggaagagatgaagattcgcggcgagcagaacgagctggaaaaagagcgcgacaacctgcaggccatcctggcctctgaacgcaagatgaataacctgctgaagaaagagctgcaggccgacgccgacgcctttggcgacgatcgccgttcgccgctgcgcgagcgcgaagaagccaaggcgatgagcgagcacgatatgctgccgtctgagccggtgactattgttctgtcgcagagcggctgggtacgcagcgccaaaggtcacgatattgacgcgccggggctgaactataaagcgggcgacagttttaaatcggccgtgaaagggaagagcaatcagccggtggtctttattgacactaccgggcgcagctacgcgattgacccgattaccctgccgtccgcgcgcggtcagggcgagccgctcaccggtaagctgacgctgcctccgggggcgacggttgaacatatgctgatggaagccgatgatcaaaaactgctgctggcttctgacgcaggctacggatttatctgtactttcaacgatctggtggcgcgtaaccgcgccggtaagacgctgattagccttccggataacgcgcacgtgatgccgccgctggtaatagaagacgaatcggacatgctgctggccattaccgctgccggccgcatgctgatgttcccggtcagtgacttgccgcagctgtcgaaaggtaagggcaacaagattattaatattccgtcggcggaagcggctgcgggccaggatggcctggcgcatctgtttgtcctgccgccgcaaagtacgctgactattcatgtcggtaagcggaaaattaaactccgtccggaagagctgcaaaaagtgaccggcgagcgcggccgccgcggctctctgatgcgcggattgcagaaaatcgatcggatagagattgattctccgcgtcgcgcctctgcgggcggtagcgaagagtaa

SEQ ID NO: 6544 - protein, 752 aa, Klebsiella pneumoniae
  misc_feature (80)..(80): Xaa can be any naturally occurring amino acid
MSDMAERLALHEFTENAYLNYSMYVIMDRALPFIGDGLKPVQRRIVYAMSELGLNASAKFKKSARTVGDVLGKYHPHGDXACYEAMVLMAQPFSYRYPLVDGQGNWGAPDDPKSFAAMRYTESRLSKYAELLLSELGQGTVDWVPNFDGTLQEPKMLPARLPNILLNGTTGIAVGMATDIPPHNLREVARAAITLIEKPQTSLDDLLDIVQGPDYPTEAEIITPRAEIRKIYQNGRGSVRMRAVWAKEDGAVVISALPHQVSGARVLEQIAAQMRNKKLPMVDDLRDESDHENPTRLVIVPRSNRVDMEQVMNHLFATTDLEKSYRINLNMIGLDNRPAVKNLLEILSEWLTFRRDTVRRRLSYRLEKVLKRLHILEGLLVAFLNIDEVIEIIRHEDEPKPALMSRFGLSETQAEAILELKLRHLAKLEEMKIRGEQNELEKERDNLQAILASERKMNNLLKKELQADADAFGDDRRSPLREREEAKAMSEHDMLPSEPVTIVLSQSGWVRSAKGHDIDAPGLNYKAGDSFKSAVKGKSNQPVVFIDTTGRSYAIDPITLPSARGQGEPLTGKLTLPPGATVEHMLMEADDQKLLLASDAGYGFICTFNDLVARNRAGKTLISLPDNAHVMPPLVIEDESDMLLAITAAGRMLMFPVSDLPQLSKGKGNKIINIPSAEAAAGQDGLAHLFVLPPQSTLTIHVGKRKIKLRPEELQKVTGERGRRGSLMRGLQKIDRIEIDSPRRASAGGSEE

SEQ ID NO: 6545 - DNA, 363 bp, Klebsiella variicola
  misc_feature (106)..(106): n is a, c, g or t
atgaaaaatttactaattttgattgccggcccggtacgcagcggcactcacaatcgcgcggaactaatcgacgctaacctgaacaatatggcccaggttgcgctangcgtttatcagaaaggacatatccccgtggtcggcgaatggctggctctccccattgccaaagccgcgggctccacggaaattggcgatgcgattagcgaggaatatctctaccccgtcgcccaccggttaattagccgctgtgacgctattttacgcctgccgggcgaatctcgcggcgcggatctggatattgaggaaggcaaaaaaagggggctgtcgatttactacagcctggaagagatcccggaccgataa

SEQ ID NO: 6546 - protein, 120 aa, Klebsiella variicola
  misc_feature (36)..(36): Xaa can be any naturally occurring amino acid
MKNLLILIAGPVRSGTHNRAELIDANLNNMAQVALXVYQKGHIPVVGEWLALPIAKAAGSTEIGDAISEEYLYPVAHRLISRCDAILRLPGESRGADLDIEEGKKRGLSIYYSLEEIPDR

SEQ ID NO: 6547 - DNA, 873 bp, Klebsiella oxytoca
  misc_feature (716)..(716): n is a, c, g or t
atgataaaaagttcgtggcgtaaaattgcaatgctagccgccgccgttccgctgctgctggcgagcggcgcactgtgggccagtaccgatgctatccatcagaagctgacagctctcgagaagcgttcaggcggcaggttgggcgtggcgctaatcaacacggcagataattctcaaatcttatatcgcggcgacgagcgttttgccatgtgcagcaccagtaaagtgatggccgccgccgcggtattaaaacagagcgaaagcaataaagaggtggtaaataaaaggctggagattaacgcagccgatttggtggtctggagtccgattaccgaaaaacatctccagagcggaatgacgctggctgagctaagcgcggcgacgctgcaatatagcgacaatacggcgatgaatctgatcatcggctaccttggcgggccggaaaaagtcaccgccttcgcccgcagtatcggcgatgccacctttcgtctcgatcgtacggagcccacgctgaataccgccatcccgggcgatgagcgtgataccagcacgccgctggcgatggctgaaagcctgcgcaagctgacgcttggcaatgcgctgggcgaacagcaacgcgcccagttagtcacctggctgaaaggcaataccaccggcgggcaaagcattcgcgcgggcctgcctgaaagctgggtggtcggcgataaaaccggcgncggagattacggcaccaccaatgatattgcggttatctggccggaaaatcacgctccgctggtattagtcacctactttacccagccgcagcaggatgcgaaaaaccgcaaagaggtgttagccgcagcggcaaaaatcgtgaccgaagggctttaa

SEQ ID NO: 6548 - protein, 290 aa, Klebsiella oxytoca
  misc_feature (239)..(239): Xaa can be any naturally occurring amino acid
MIKSSWRKIAMLAAAVPLLLASGALWASTDAIHQKLTALEKRSGGRLGVALINTADNSQILYRGDERFAMCSTSKVMAAAAVLKQSESNKEVVNKRLEINAADLVVWSPITEKHLQSGMTLAELSAATLQYSDNTAMNLIIGYLGGPEKVTAFARSIGDATFRLDRTEPTLNTAIPGDERDTSTPLAMAESLRKLTLGNALGEQQRAQLVTWLKGNTTGGQSIRAGLPESWVVGDKTGXGDYGTTNDIAVIWPENHAPLVLVTYFTQPQQDAKNRKEVLAAAAKIVTEGL

SEQ ID NO: 6549 - DNA, 1032 bp, Klebsiella oxytoca
  misc_feature (204)..(204): n is a, c, g or t
atgttcccgtcacagttaccgaaaccgcgccatcctgccgctgcggcgatcccctcgctgcgctgggccattattggccccggctggattgccgagcgctttgtgaaatcgttaaaagagctcagccgccagcgggtggttgccgtctcctcgcggacgcaacaaaaggccgatagctttgccgcccgctgggggatcccgcangcttacgctcaggtggacgagatgctggcgcgaccggatattgatgcggtttacgttgccaccccgcataaccaccacttcccggacgggctgcgggttctgcaggcgggcaaacatgtactgattgaaaagccgtttgcgctgaaccggcgggaaggcgcggcgctaaaagcagaagccctgaaacaggggaagctggcgatggaggcgatgtggtgcgattacgcgccgaaatatgacgtgattcgccagctgctggatgacggcgcgctgggcgatctgcatacgctgctcgccgatcacggtgaatattttacttcggatcatcgcatttttaatgccgatcttgccggtggaccgatgatggatctcggcagctatctgacctcattcagcgtgatggtcggcggcgtgccgcaggacattgtcgcccgcgggcgccccgcccaaaggggcatcaatgggcaaatttcgatgctgtttaactgggaaaacggcttacagggattgctcaacaccacgctattcagcaatacgccgggcggcgcggtggtggccgggcgcgacgcgaccctggtccttgacgggcaattctatgcgccggggaattttaccctcgccgccagccaggggggacagatactgcgctgggaagagccgcgtaaccgctacgaccagctgttttatcaggccgaacattttgcctggtgcgtggggcaagggctcacggattcgccgattcgcccgctgaccagagttctggaaaacctgagcgtcatggatgaagtgcggcggcagattggcgtaatatttaacgaggagcgttaa

SEQ ID NO: 6550 - protein, 343 aa, Klebsiella oxytoca
  misc_feature (68)..(68): Xaa can be any naturally occurring amino acid
MFPSQLPKPRHPAAAAIPSLRWAIIGPGWIAERFVKSLKELSRQRVVAVSSRTQQKADSFAARWGIPXAYAQVDEMLARPDIDAVYVATPHNHHFPDGLRVLQAGKHVLIEKPFALNRREGAALKAEALKQGKLAMEAMWCDYAPKYDVIRQLLDDGALGDLHTLLADHGEYFTSDHRIFNADLAGGPMMDLGSYLTSFSVMVGGVPQDIVARGRPAQRGINGQISMLFNWENGLQGLLNTTLFSNTPGGAVVAGRDATLVLDGQFYAPGNFTLAASQGGQILRWEEPRNRYDQLFYQAEHFAWCVGQGLTDSPIRPLTRVLENLSVMDEVRRQIGVIFNEER

SEQ ID NO: 6551 - DNA, 1032 bp, Escherichia coli
  misc_feature (523)..(523): n is a, c, g or t
atgttcccgtcacagttaccgaaaccgcgccatcctgccgctgcggcgatcccctcgctgcgctgggccattattggccccggctggattgccgagcgctttgtgaaatcgttaaaagagctcagccgccagcgggtggttgccgtctcctcgcggacgcaacaaaaggccgatagctttgccgcccgctgggggatcccgcaggcttacgctcaggtggacgagatgctggcgcgaccggatattgatgcggtttacgttgccaccccgcataaccaccacttcccggacgggctgcgggttctgcaggcgggcaaacatgtactgattgaaaagccgtttgcgctgaaccggcgggaaggcgcggcgctaaaagcagaagccctgaaacaggggaagctggcgatggaggcgatgtggtgcgattacgcgccgaaatatgacgtgattcgccagctgctggatgacggcgcgctgggcgatctgcatacgctgctcgccgatcacggtgaatattttactncggatcatcgcatttttaatgccgatcttgccggtggaccgatgatggatctcggcagctatctgacctcattcagcgtgatggtcggcggcgtgccgcaggacattgtcgcccgcgggcgccccgcccaaaggggcatcaatgggcaaatttcgatgctgtttaactgggaaaacggcttacagggattgctcaacaccacgctattcagcaatacgccgggcggcgcggtggtggccgggcgcgacgcgaccctggtccttgacgggcaattctatgcgccggggaattttaccctcgccgccagccaggggggacagatactgcgctgggaagagccgcgtaaccgctacgaccagctgttttatcaggccgaacattttgcctggtgcgtggggcaagggctcacggattcgccgattcgcccgctgaccagagttctggaaaacctgagcgtcatggatgaagtgcggcggcagattggcgtaatatttaacgaggagcgttaa

SEQ ID NO: 6552 - protein, 343 aa, Escherichia coli
  misc_feature (175)..(175): Xaa can be any naturally occurring amino acid
MFPSQLPKPRHPAAAAIPSLRWAIIGPGWIAERFVKSLKELSRQRVVAVSSRTQQKADSFAARWGIPQAYAQVDEMLARPDIDAVYVATPHNHHFPDGLRVLQAGKHVLIEKPFALNRREGAALKAEALKQGKLAMEAMWCDYAPKYDVIRQLLDDGALGDLHTLLADHGEYFTXDHRIFNADLAGGPMMDLGSYLTSFSVMVGGVPQDIVARGRPAQRGINGQISMLFNWENGLQGLLNTTLFSNTPGGAVVAGRDATLVLDGQFYAPGNFTLAASQGGQILRWEEPRNRYDQLFYQAEHFAWCVGQGLTDSPIRPLTRVLENLSVMDEVRRQIGVIFNEER

SEQ ID NO: 6553 - DNA, 1881 bp, Klebsiella oxytoca
  misc_feature (937)..(937): n is a, c, g or t
atgaactataacgaaacagcagacaaaatcctccacgcggtgggcggtgcggagaacatccgtatgctcacccattgcgcgacccggctgcgcatggagttcaacgaccgcgcaaaggttaacgatgcgcagattggcgccctccccggcgtgatcagcgtagtggagaagggcggccagttccagatagttatcggcaatgaggtgcagcaggtttatcgcctgctcaataaggcgctgccggagaaaaaaggcccggcaggcggcgataaaaacgcgaagccggccggcatcgtcgcccggattatcagcgttatttcgaccacctttaccccggtgatcccggcgattaccggcgcggggatgattaaagcgctgctggccattctcaagctcaccggggtgattagcgaaaccagctcgacgtatcagctgctgaatattattgccgacgccgccttcttcttcctgccggtgctgctggcctacggcgcatcgctgaagtttgaatgcaacccgattctggcgatgaccctcgcgggcgtgctgctgcatccgggcatcggccagatgctggcggccggtaaagcggtggattttgtcggcatcaacgtcctgctttccgattacgccggttcggtgctgccgattattctgaccgtgtggctgatgtcgtgggtggagcgcttcgccgaaaaagtgtcgccatcgattatcaagtttttcgttaagccgatgctgattctgctgattaccgcgccgctggcgctggtggtggtcggcccggcgggcattttgcttaacgacctggtggctgcgggggcgggcgctatcgaccgccacgccagctggttaatcccgatgctgatgggcaccctgcagcccttcctgatcattaccggcaccgcctgggcgatgacgccgatcgccaccggtnagctgagtaaaagcggttacgagatgattaacggcccggggatgctggcctcaaacgtggcgatgggagcggcgacgctgtgcgtggcgctgaaaaccaaaaatagcaacctgcgccagctggcctcctcgtcgggatttaccgcactgctggggatcaccgaaccggcgctgtacggggtgctgctcaagttccgccgcgtgctgattgccgcgatgatcggcggcggctgcgccggggtctatgccggggtgagcgggctggtgcgctacgcgtttgtctcgccaggcctcgcggcgctgccggcgtttatcggtgaaaacccgatgaacatcgttcatgcgctggtgacctgcgcgatttcgatcgtggtgacctttaccctgacctggtttctcgccttcaaagatgttcctgaggaacaagaagcggtggacgaggcgccgcagcctgcggcgagcgctaaaagcgagggggagacggaggtattaagcctgctgcgcggtcaggtggtggcgctcagtgaagtgaatgacgacgtcttttccggcggtctgttgggcgaggggctggcgattcgtcccgaagagggagtactgcgcgcgccgtttagcggcacggtgatgatgtttctgccctcctgccacgccgttggcctgcagagcgacagcggggttgagctgctgatccatatcggtattgataccgttaatcttaacggccagcactttagctcatcgctgaaggtgggggatagggtggaggcggggcaggtgctgatccgctttgatattcccgccatcgaacaggccggatacgacctgattacgccagtcattgtggtcaacggcgatgggcagcacgctctgcgctttaccgacgccgcccgggtggattacggcgagacgctgatggtgcaatccgttaaggaggcgcagccatga

SEQ ID NO: 6554 - protein, 626 aa, Klebsiella oxytoca
  misc_feature (313)..(313): Xaa can be any naturally occurring amino acid
MNYNETADKILHAVGGAENIRMLTHCATRLRMEFNDRAKVNDAQIGALPGVISVVEKGGQFQIVIGNEVQQVYRLLNKALPEKKGPAGGDKNAKPAGIVARIISVISTTFTPVIPAITGAGMIKALLAILKLTGVISETSSTYQLLNIIADAAFFFLPVLLAYGASLKFECNPILAMTLAGVLLHPGIGQMLAAGKAVDFVGINVLLSDYAGSVLPIILTVWLMSWVERFAEKVSPSIIKFFVKPMLILLITAPLALVVVGPAGILLNDLVAAGAGAIDRHASWLIPMLMGTLQPFLIITGTAWAMTPIATGXLSKSGYEMINGPGMLASNVAMGAATLCVALKTKNSNLRQLASSSGFTALLGITEPALYGVLLKFRRVLIAAMIGGGCAGVYAGVSGLVRYAFVSPGLAALPAFIGENPMNIVHALVTCAISIVVTFTLTWFLAFKDVPEEQEAVDEAPQPAASAKSEGETEVLSLLRGQVVALSEVNDDVFSGGLLGEGLAIRPEEGVLRAPFSGTVMMFLPSCHAVGLQSDSGVELLIHIGIDTVNLNGQHFSSSLKVGDRVEAGQVLIRFDIPAIEQAGYDLITPVIVVNGDGQHALRFTDAARVDYGETLMVQSVKEAQP

SEQ ID NO: 6555 - DNA, 1881 bp, Klebsiella oxytoca
  misc_feature (1814)..(1814): n is a, c, g or t
atgaactataacgaaacagcagacaaaatcctccacgcggtgggcggtgcggagaacatccgtatgctcacccattgcgcgacccggctgcgcatggagttcaacgaccgcgcaaaggttaacgatgcgcagattggcgccctccccggcgtgatcagcgtagtggagaagggcggccagttccagatagttatcggcaatgaggtgcagcaggtttatcgcctgctcaataaggcgctgccggagaaaaaaggcccggcaggcggcgataaaaacgcgaagccggccggcatcgtcgcccggattatcagcgttatttcgaccacctttaccccggtgatcccggcgattaccggcgcggggatgattaaagcgctgctggccattctcaagctcaccggggtgattagcgaaaccagctcgacgtatcagctgctgaatattattgccgacgccgccttcttcttcctgccggtgctgctggcctacggcgcatcgctgaagtttgaatgcaacccgattctggcgatgaccctcgcgggcgtgctgctgcatccgggcatcggccagatgctggcggccggtaaagcggtggattttgtcggcatcaacgtcctgctttccgattacgccggttcggtgctgccgattattctgaccgtgtggctgatgtcgtgggtggagcgcttcgccgaaaaagtgtcgccatcgattatcaagtttttcgttaagccgatgctgattctgctgattaccgcgccgctggcgctggtggtggtcggcccggcgggcattttgcttaacgacctggtggctgcgggggcgggcgctatcgaccgccacgccagctggttaatcccgatgctgatgggcaccctgcagcccttcctgatcattaccggcaccgcctgggcgatgacgccgatcgccaccggtcagctgagtaaaagcggttacgagatgattaacggcccggggatgctggcctcaaacgtggcgatgggagcggcgacgctgtgcgtggcgctgaaaaccaaaaatagcaacctgcgccagctggcctcctcgtcgggatttaccgcactgctggggatcaccgaaccggcgctgtacggggtgctgctcaagttccgccgcgtgctgattgccgcgatgatcggcggcggctgcgccggggtctatgccggggtgagcgggctggtgcgctacgcgtttgtctcgccaggcctcgcggcgctgccggcgtttatcggtgaaaacccgatgaacatcgttcatgcgctggtgacctgcgcgatttcgatcgtggtgacctttaccctgacctggtttctcgccttcaaagatgttcctgaggaacaagaagcggtggacgaggcgccgcagcctgcggcgagcgctaaaagcgagggggagacggaggtattaagcctgctgcgcggtcaggtggtggcgctcagtgaagtgaatgacgacgtcttttccggcggtctgttgggcgaggggctggcgattcgtcccgaagagggagtactgcgcgcgccgtttagcggcacggtgatgatgtttctgccctcctgccacgccgttggcctgcagagcgacagcggggttgagctgctgatccatatcggtattgataccgttaatcttaacggccagcactttagctcatcgctgaaggtgggggatagggtggaggcggggcaggtgctgatccgctttgatattcccgccatcgaacaggccggatacgacctgattacgccagtcattgtggtcaacggcgatgggcagcacgctctgcgctttancgacgccgcccgggtggattacggcgagacgctgatggtgcaatccgttaaggaggcgcagccatga

SEQ ID NO: 6556 - protein, 626 aa, Klebsiella oxytoca
  misc_feature (605)..(605): Xaa can be any naturally occurring amino acid
MNYNETADKILHAVGGAENIRMLTHCATRLRMEFNDRAKVNDAQIGALPGVISVVEKGGQFQIVIGNEVQQVYRLLNKALPEKKGPAGGDKNAKPAGIVARIISVISTTFTPVIPAITGAGMIKALLAILKLTGVISETSSTYQLLNIIADAAFFFLPVLLAYGASLKFECNPILAMTLAGVLLHPGIGQMLAAGKAVDFVGINVLLSDYAGSVLPIILTVWLMSWVERFAEKVSPSIIKFFVKPMLILLITAPLALVVVGPAGILLNDLVAAGAGAIDRHASWLIPMLMGTLQPFLIITGTAWAMTPIATGQLSKSGYEMINGPGMLASNVAMGAATLCVALKTKNSNLRQLASSSGFTALLGITEPALYGVLLKFRRVLIAAMIGGGCAGVYAGVSGLVRYAFVSPGLAALPAFIGENPMNIVHALVTCAISIVVTFTLTWFLAFKDVPEEQEAVDEAPQPAASAKSEGETEVLSLLRGQVVALSEVNDDVFSGGLLGEGLAIRPEEGVLRAPFSGTVMMFLPSCHAVGLQSDSGVELLIHIGIDTVNLNGQHFSSSLKVGDRVEAGQVLIRFDIPAIEQAGYDLITPVIVVNGDGQHALRFXDAARVDYGETLMVQSVKEAQP

SEQ ID NO: 6557 - DNA, 2187 bp, Raoultella ornithinolytica
  misc_feature (385)..(385): n is a, c, g or t
atgtctaatcgtatcgataaggacgtgattaatgcgcttatcgccggccattttgcggatcctttttccgtgcttggcatgcattacaccgacgccgggctggaagttcgtgcattattacccgatgccaccgaagtgtgggtcattgaaccaaaaaccggacgcaaagtcggcaagctggaatgcctcgactcgcgcggtttctttagcggcgttctgccgcgtcgtaaaaatccttttcgttatcagttggctgtcacctggcacgggcagcagaatctgatcgatgacccgtaccgttttggcccgctgctgcaggatctggatgtctggctgctgtcggaaggcacgcacctgcgtccgtatgaaacgttgggcgcgcatnccgatactatggacggcgtggtcggcacgcgtttctcggtctgggcgcctaacgcccgtcgggtgtcggtcgtcggccagtttaactactgggatggtcgccgccacccgatgcgcctgcgtaaagagtccggcatctgggagctgttcgttcccggcgcgctgaacggccagctgtataaattcgagctgattgatgcccacggcaacctgcgggtgaagtccgacccttacgcttttgaagcgcagatgcgcccggatagcgcctcgctcatctgcgggctgccggaaaaggtccagcagccgccggagcgcaagctggctaaccagtttgatgcgccaatctcgatttatgaggtgcacctcggctcctggcgtcgccataccgataataacttctggctgagctaccgcgagcttgccgaccaactggtgccttatgccaaatggatgggcttcacccatcttgaactactaccggttaatgagcatccgtttgacggcagctggggctatcagccaaccgggctatatgcgccaactcgtcgcttcggcacccgggaggatttcctctactttatcaacgccgcgcacgctgcgggcctgaacgtgattctggactgggtacccggccattttccggcggatgatttcgcgctcgcctcgtttgacggcacctcgttgtatgaacatagcgacccgcgcgaaggctaccaccaggactggaacaccctgatttacaactacggtcgtcgcgaggtcagtaattatctggtcggcaatgcgctgtactggatcgaacgcttcggcattgacgcgctgcgggttgatgcggtggcatcaatgatttatcgcgactatagccgcaaacagggcgagtgggtgccgaacgaattcggcggtcgggaaaaccttgaagccattgagtttctgcgcaataccaaccgcgtgctgggcgagcagacgccgggcgcggtgacgatggcggaagagtcgaccgatttccccggcgtgtctcgtccttcctccaccggcgggctcggcttctggttcaagtggaaccttggctggatgcacgacaccctcgactatatgaagctggacccggtgcatcgccgacatcatcacgacaagatgaccttcggtatgctctacaactacaccgaaaactttgtcctgccgctctctcatgatgaggtcgtgcacggcaaaaaatcgattctcgaccgtatgccgggcgatgcctggcagaagttcgctaacctgcgcgcgtactacggctggctgtttgccttcccgggtaaaaagctgctgtttatgggcaatgagtttgctcaagggcgagaatggaaccacgatacaagccttgactggcatctgctggaaggcggcgataactggcaccacggcgtccagcggctggtgcgcgatctcaaccatacttatcgccaccataaagcgctgcatgaactggattttgacccctacggatttgaatggctggtggtggacgaccacgagcgctcggtctttatctttgttcgtcgcgacagggcgggtaacgaaattatcgtcgccagcaacttcacgccagtgccgcgccatgagtatcgctttggcatcaaccagcctggccgctggcgtgaagagctgaacaccgactctatgcactaccacggtagcaataccggcaacggcggcgtcgtcgagagcgacccgatcgccagccacggtcgtgaacactcgctctccattacgctgccgccgctggcgacggtatggctggtgcgggaggcgcaatga

SEQ ID NO: 6558 - protein, 728 aa, Raoultella ornithinolytica
  misc_feature (129)..(129): Xaa can be any naturally occurring amino acid
MSNRIDKDVINALIAGHFADPFSVLGMHYTDAGLEVRALLPDATEVWVIEPKTGRKVGKLECLDSRGFFSGVLPRRKNPFRYQLAVTWHGQQNLIDDPYRFGPLLQDLDVWLLSEGTHLRPYETLGAHXDTMDGVVGTRFSVWAPNARRVSVVGQFNYWDGRRHPMRLRKESGIWELFVPGALNGQLYKFELIDAHGNLRVKSDPYAFEAQMRPDSASLICGLPEKVQQPPERKLANQFDAPISIYEVHLGSWRRHTDNNFWLSYRELADQLVPYAKWMGFTHLELLPVNEHPFDGSWGYQPTGLYAPTRRFGTREDFLYFINAAHAAGLNVILDWVPGHFPADDFALASFDGTSLYEHSDPREGYHQDWNTLIYNYGRREVSNYLVGNALYWIERFGIDALRVDAVASMIYRDYSRKQGEWVPNEFGGRENLEAIEFLRNTNRVLGEQTPGAVTMAEESTDFPGVSRPSSTGGLGFWFKWNLGWMHDTLDYMKLDPVHRRHHHDKMTFGMLYNYTENFVLPLSHDEVVHGKKSILDRMPGDAWQKFANLRAYYGWLFAFPGKKLLFMGNEFAQGREWNHDTSLDWHLLEGGDNWHHGVQRLVRDLNHTYRHHKALHELDFDPYGFEWLVVDDHERSVFIFVRRDRAGNEIIVASNFTPVPRHEYRFGINQPGRWREELNTDSMHYHGSNTGNGGVVESDPIASHGREHSLSITLPPLATVWLVREAQ

SEQ ID NO: 6559 - DNA, 2052 bp, Klebsiella oxytoca
  misc_feature (1413)..(1413): n is a, c, g or t
atgaccagaacccgtaaaaccgtggctattatcctcggaacgatagtcgtactgatcgttctgttttttattgtggtggcgacctttgactggaatcgcttgaagccgacgattaatcagaaagtgtcggccgagctgaaccgcccgtttgcgattcgcggcgatctgggcgtcgtgtgggagcgccagcccggcgaaagaggctggcgaagctggataccctggccgcacgtgcatgccgaagatattatcctcggcaacccgcctgacatcccgcaggtcaccatggttcacctgccgcgcgttgaggcgaccctcgccccgctggcgctgctcagtaaaacggtctatctaccgtggattaagcttgaacagccggacgcgcgattgattcgactgtcggagaagagcaacaactggactttcgacctggcttcggcgggggcggctgagaaagatgcggcgccttccagctggtctttccgactcgacaatattcttttcgatcgcggcaagattgctatcgatgacaaggtatcgcgcgccgacgtgacgatcgtggttgatccgctcggtaagccgctggcgtttagtgaagtgaccggcgaaaaagggaaaggagcgccgcagaaagtgggcgattacgtcttcggcctgcaggcgaaagggagctacaacgggcagccgctctccggtaacggcaaaatcggcggcatgctggcgctgcgcagcgaagggacaccgttcccgctgcagggggattttcgttccggcaatacccgggtcgcttttaccggcacggtcagcgatccgctcaatctcggcggcgtcgatctgcgcctcaagttttccggtgattcgctgggcgatctctacgatctgaccggcgtattgctgccggatacgccgactttctctaccgacggccatctgcgcgccacctttaaggagaaaaacggttcacgcttcgcctatcaggatttcaatggccgtattggcgagagtgatatccacgggtcgctgacctacaccaccggtaaaccccggcctaagctggagggcgatctggagtccaggcagctacggctggcggatctggggccgctgattggcgtcgattccggcggtaaaggcagccagactgaacggcgtaaaggtgaagcttctccgcagccagccggaaaagtgttgccgtatgaccgctttgaaaccgacaagtggcaggtaatggatgccgatgtgcgcttcaaaggacggcggattgagcacggcagcacgctacccatcagcgacctttctacgcacatcatcctgcagcgaggcgacctgcgcctgcagccgctgcgtctggggctggctaacggtaccctcgccggcagcattcatcttgaaggggataaaaaaccgctgcangggacggccaacctacaggcgcgccgcctgaagctcaaagcgctgatgccaaacgtggagatgatgcagaaaacgctcggcgaaatgaacggcgatgttcagcttcgcggcaccggtaactccgtcgccgcgctgctgggcaacagtaacggtaacctgaagctgctgatgaacgacgggctgattagccgtaacctgatggagatcctcggcctgaacgtcggtaactttattatcggccagatctttggcgatgatgaggtgcgggtgaactgcgcggcggcgaatatcgacgtggtcaacggcgtcgcccggccgcaggtgttcgcgtttgataccgaaaacgcgctgatcaacgtgaccgggaccgccagctttgcgtcggagcagctggacctcactatcgatccggagagtaagggctttcgtattatcaccctgcgctccccgctgtacgttcgcggcagctttaagtcgccgaatgcgggcgtgaaggcggggccgctgattgcccgcggcgcggtagcggcagcgctggcgacgctggtgacgccggcagcagcgctgctggcgctgatatcacctgccgaaggcgaggcgaaccagtgtcgggcaatcttgtcgcagatgaaaaaatag

SEQ ID NO: 6560 - protein, 683 aa, Klebsiella oxytoca
  misc_feature (471)..(471): Xaa can be any naturally occurring amino acid
MTRTRKTVAIILGTIVVLIVLFFIVVATFDWNRLKPTINQKVSAELNRPFAIRGDLGVVWERQPGERGWRSWIPWPHVHAEDIILGNPPDIPQVTMVHLPRVEATLAPLALLSKTVYLPWIKLEQPDARLIRLSEKSNNWTFDLASAGAAEKDAAPSSWSFRLDNILFDRGKIAIDDKVSRADVTIVVDPLGKPLAFSEVTGEKGKGAPQKVGDYVFGLQAKGSYNGQPLSGNGKIGGMLALRSEGTPFPLQGDFRSGNTRVAFTGTVSDPLNLGGVDLRLKFSGDSLGDLYDLTGVLLPDTPTFSTDGHLRATFKEKNGSRFAYQDFNGRIGESDIHGSLTYTTGKPRPKLEGDLESRQLRLADLGPLIGVDSGGKGSQTERRKGEASPQPAGKVLPYDRFETDKWQVMDADVRFKGRRIEHGSTLPISDLSTHIILQRGDLRLQPLRLGLANGTLAGSIHLEGDKKPLXGTANLQARRLKLKALMPNVEMMQKTLGEMNGDVQLRGTGNSVAALLGNSNGNLKLLMNDGLISRNLMEILGLNVGNFIIGQIFGDDEVRVNCAAANIDVVNGVARPQVFAFDTENALINVTGTASFASEQLDLTIDPESKGFRIITLRSPLYVRGSFKSPNAGVKAGPLIARGAVAAALATLVTPAAALLALISPAEGEANQCRAILSQMKK

SEQ ID NO: 6561 - DNA, 930 bp, Klebsiella oxytoca
  misc_feature (547)..(547): n is a, c, g or t
atgtctaagaaaattgccgtcattggcgaatgcatgattgagctgtcagagaaaggcgcggcggtaaatcgcggctttggcggcgacaccttaaacacttccgtctacattgcccgccagaccgacgccagcgagctgggcgtacactatgttaccgccctgggcacggacaccttcagccagcagatgctcgaatcctggcagagtgagaatgtccagacggaccttattcagcgcatggccgaccgtttaccgggcctctactacatcgaaactgacgataccggcgagcgtacgttttactactggcgtaatgaagccgcagcgaagttctggctggagagcgagcagtctgcggccatctgcgaagagctggcgacctatgattatctttacctcagcggcatcagcctggcgatcctgagcccgacaagccgcgagaagctgctgaccctgctgcgggaatgccgggcaaacggcggtaaagttatctttgataacaactatcgtccgcgcctgtggagcagtaaagaagagacgcagcagntttatcagcagatgctggcctgcaccgacattgcgttcctgacccttgatgacgaagacgcgctgtggggcgagaagccagtggcagaggtgattgcccgcactcacgccgctggcgttgaagaagtggtggtgaagcgcggcgccgactcctgcctggtagcgattgccggacagccgcagctggaagtcccggccgttaagctggcaaaagagaaagtcgttgataccacggcagcgggcgattcattcagcgccggctatctggccgtgcgcctgaccggcggcgatgccgaatcggcggcaaaacgcggccacctgaccgccagcacggtgattcagtatcgcggtgcgattatcccgcgcgaagcgatgccgcagtaa

SEQ ID NO: 6562 - protein, 309 aa, Klebsiella oxytoca
  misc_feature (183)..(183): Xaa can be any naturally occurring amino acid
MSKKIAVIGECMIELSEKGAAVNRGFGGDTLNTSVYIARQTDASELGVHYVTALGTDTFSQQMLESWQSENVQTDLIQRMADRLPGLYYIETDDTGERTFYYWRNEAAAKFWLESEQSAAICEELATYDYLYLSGISLAILSPTSREKLLTLLRECRANGGKVIFDNNYRPRLWSSKEETQQXYQQMLACTDIAFLTLDDEDALWGEKPVAEVIARTHAAGVEEVVVKRGADSCLVAIAGQPQLEVPAVKLAKEKVVDTTAAGDSFSAGYLAVRLTGGDAESAAKRGHLTASTVIQYRGAIIPREAMPQ

SEQ ID NO: 6563 - DNA, 1389 bp, Klebsiella oxytoca
  misc_feature (809)..(809): n is a, c, g or t
atgactaccgagattcgtgcgctttatacccggcttccggccatcgaccgtttactccgcgatcccgcattctcgccgctgctgatgcaatatggtcactcccagacggtggcgctgctgcgccagatgctggacgaggcgcgggaaaatatccgtcagaaccaggcgctgccgggctggtgcgatgactggatgcaggaaacgacgaggcggctggcgctgacgcagcagagcgcgctgcgtccggtttttaacctgaccggtaccgtgttgcacaccaatcttggccgggcgattcaggcggaagcggcggttgaggcggttgcccgggcgatgcgcgcgccggtgacgctggaatacgatcttgatgatgccggacgcggccaccgcgaccgagcgctcgccgacctcctgtgccgtatcaccggtgcggaagacgcctgtatcgtcaataacaacgcggcggcggtactgctgatgctggcggcgatcgccggcggcagcgaggtggtggtatcgcgcggtgagctggtggagatcggcggcgcgttccgtattcctgacgtgatgcgccaggcgggctgcgttctgcatgaagtcggtaccactaaccgcacccacgcgaaagattatcgtcaggcggtgaacgacaataccggcctgctgatgaaggtgcataccagcaactacagcattgagggcttcacgaaagcggtcgatgaagcggagctggccgagctggggcgcgagttgaatatcccggtggtggccgatctcggtagcggttcgctggtagatttaagccagtncggcctgccgaaagagccgatgccgcaggagatgattgccgcaggcgtcagcctggtgagcttctcaggcgataaactgctggggggcccgcaggcgggaatcatcgtcggcaaaaaatcgctaatcgcccgtttgcagagccatccgctcaagcgcgccctgcgggcggataaaatgaccctcgcggccctggaagccacgctgcgcctctatctgcacccggaaaagttggccgcagagctgccgactctacgcctgctgactcgtcaggcggatgatattcgtcagcaggccgaacgtatacgaacggctctggtcgcgcattatgctgattttgacctgcgggttgagccatgcctgtcgcagatcggcagcggctcgctgccggtggaccgcttgcccagcgcggcgttgacgttgactccgcgcgatggtcgcggcagccagctggaggccctggcggcacgctggcgtctgctgtccgtgccggttattggcaggatctatgatggccgcctgtggctggacctgcgctgtcttgaggatgaaacccggtttatggagatgttactgagatga

SEQ ID NO: 6564 - protein, 462 aa, Klebsiella oxytoca
  misc_feature (270)..(270): Xaa can be any naturally occurring amino acid
MTTEIRALYTRLPAIDRLLRDPAFSPLLMQYGHSQTVALLRQMLDEARENIRQNQALPGWCDDWMQETTRRLALTQQSALRPVFNLTGTVLHTNLGRAIQAEAAVEAVARAMRAPVTLEYDLDDAGRGHRDRALADLLCRITGAEDACIVNNNAAAVLLMLAAIAGGSEVVVSRGELVEIGGAFRIPDVMRQAGCVLHEVGTTNRTHAKDYRQAVNDNTGLLMKVHTSNYSIEGFTKAVDEAELAELGRELNIPVVADLGSGSLVDLSQXGLPKEPMPQEMIAAGVSLVSFSGDKLLGGPQAGIIVGKKSLIARLQSHPLKRALRADKMTLAALEATLRLYLHPEKLAAELPTLRLLTRQADDIRQQAERIRTALVAHYADFDLRVEPCLSQIGSGSLPVDRLPSAALTLTPRDGRGSQLEALAARWRLLSVPVIGRIYDGRLWLDLRCLEDETRFMEMLLR

SEQ ID NO: 6565 - DNA, 1224 bp, Klebsiella oxytoca
  misc_feature (554)..(554): n is a, c, g or t
atgaataaggatttttctcaggccccgcgccccacatttaaaagagcgctacgccgtatcagcatgataagcgttgttatctctatgacactggtctggctattgctctgcgccgcttccatattcacactcaagcaatacgcacaaaaaaatctggagctcaccgccgccacgatgggccgtagtctggaagccgcgctggtctttggcgatagcgcggcggctgaagataccctggccacgctgggcaagcagggacagttttcgcaggcaatcctggtcgacggtcggcagaagccctttgcctcatggcataacgatggcctggccaggcaggataaagtcagcgacgttatcagcaaatggctattcccggaacccacggtacaacctatcctgcaccagggaaaagttatcggtgaacttcgtctgaccgcgctggacaggctgataagctatttcctcggtatctcaattattgtgctaaccggcagcatttttctcgcctcatgcattgcattgctgcttacccactcgctgcatcgcggcatcgnggctgcgctgcagagtattaccgaggtagtccatgatatccgcgaaaatcgccatttctctcgtcgggtccccgaagagcgtattgaagagtttcacctctttgcccaggactttaatagtctgctgggcgagatggaggactggcagcggcagcttcaggctaaaaatgcccagcttctgcgtagctccttgcacgatccgttgaccggcctggctaacagagccgctttccgcaacgttattaatgcgttgatgaaagacgaaaccgtccatggtagttctgcgctgctgtttcttgacggcgataatttcaagctcattaacgataactggggccatgctgccggcgacaaggtgttaattgaggtcgccagccgcctgatggcctttgtcggcaaacagcaccaggcgtggcgtctcggcggcgatgaatttgccgttctgctgcgcaatgttcatacagaggctgaagttcaggcactctgcagcgcattgtcggaacagtttatcccgccgtttaatctccacaacggccacaccgtcaggctgtcgctgagtattggttacgcattaacctgggaacatgcctccgcggaaaatctgcaagaacttgccgaccaaaatatgtatcggatgaaacaccagcgcttacagcgaacgcaaaaataa

SEQ ID NO: 6566 - protein, 407 aa, Klebsiella oxytoca
  misc_feature (185)..(185): Xaa can be any naturally occurring amino acid
MNKDFSQAPRPTFKRALRRISMISVVISMTLVWLLLCAASIFTLKQYAQKNLELTAATMGRSLEAALVFGDSAAAEDTLATLGKQGQFSQAILVDGRQKPFASWHNDGLARQDKVSDVISKWLFPEPTVQPILHQGKVIGELRLTALDRLISYFLGISIIVLTGSIFLASCIALLLTHSLHRGIXAALQSITEVVHDIRENRHFSRRVPEERIEEFHLFAQDFNSLLGEMEDWQRQLQAKNAQLLRSSLHDPLTGLANRAAFRNVINALMKDETVHGSSALLFLDGDNFKLINDNWGHAAGDKVLIEVASRLMAFVGKQHQAWRLGGDEFAVLLRNVHTEAEVQALCSALSEQFIPPFNLHNGHTVRLSLSIGYALTWEHASAENLQELADQNMYRMKHQRLQRTQK

SEQ ID NO: 6567 - DNA, 1662 bp, Enterobacter cloacae
  misc_feature (929)..(929): n is a, c, g or t
atgttggcacaactcactatcagtaattttgctatcgttcgtgagctggaaatcgattttcacagcggtatgaccgccattaccggcgagaccggcgccggtaaatcgatcgctatcgacgcgctggggctgtgcctgggcggtcgggcggaagccgatatggtgcgcagaggcgccagccgggctgatttatgcgcgcgcttctccctgaaagacacgccggccgcacaacgctggctggaacaaaaccagctcgaaagcgggcgtgagtgtttacttcgccgcgttatcagcgcagacggccgctctcgcggctttattaacggtacggcggtgcctttatcccagctccgcgaactgggacagcttcttatccagatccatggccagcatgcgcaccaactgctgactaagcccgaacatcagaagactttacttgatggctataccggtgagtatgcgcttactcagctaatggctgaacgctatcgtcagtggcacaaaagctgccgcgatctggcgcagcatcagcagcaaagccaggagcgcgccgcgcgtgcggatctggtgcagtatcaactaaaagagctcaacgagtttaatccgcagccgggcgaattcgagcaaattgatgaagagtacaaacgtctggccaacagcggtcaattgctgtcgacctgtcagcatgcgctgtcggtgatggcagacggcgaagaatccaatctgcaaagccagctctatgccgcaaagcagctggtgagcgagctggttggtatggacagtaaactctccggagtgctggatatgcttgaagaagcatctattcagcttagcgaagccacggacgagctgcgtcattatcacgatcgcctcgatctcgatccgaatcgtctgttcgaactggaacaacgtatctcccgacaaattgncctggcgcgcaagcatcaaattacgcccgaggagcttccagaattttaccagtcactgctggaagagcagcgtctgctggatgatagcgccggttccctggaatccctcagtcagatggtcgtggagcatcatcagttagcccttgagacggcgaagcagctacatgccctgcgtcagaatagcgctgatgagctgactcggttaattacggagagtatgcactcactttcaatgccacacggtgtattctccattgatgtcgcgtttgatgagcgtcatctcaccgctgaaggcgcagaccatattgaattccgggtaaccaccaacccgggtcagccgctgcagccaatcgctaaagttgcttccggaggcgaactctcgcgtattgcgctggcgattcaggtgatcactgcgcggaaaatggaaactccggcattgatttttgatgaagtagatgtcggtatcagtggccctacggcagcggtggtgggcaaactgctgcgccagctaggtgagtcaacccaggtgatgtgcgttacccacttaccgcaggtggccggttgcggacatcatcatttcttcgtctgcaaggaaacagacggtgaaatgaccgagacgcatatgcaccctctggataaacgcgctcgcttgcaggaactggcccgtctgctgggcggcagtgaagtcactcgtaacactctggcaaacgcgaaagagttgcttgccgcgtaa

SEQ ID NO: 6568 - protein, 553 aa, Enterobacter cloacae
  misc_feature (310)..(310): Xaa can be any naturally occurring amino acid
MLAQLTISNFAIVRELEIDFHSGMTAITGETGAGKSIAIDALGLCLGGRAEADMVRRGASRADLCARFSLKDTPAAQRWLEQNQLESGRECLLRRVISADGRSRGFINGTAVPLSQLRELGQLLIQIHGQHAHQLLTKPEHQKTLLDGYTGEYALTQLMAERYRQWHKSCRDLAQHQQQSQERAARADLVQYQLKELNEFNPQPGEFEQIDEEYKRLANSGQLLSTCQHALSVMADGEESNLQSQLYAAKQLVSELVGMDSKLSGVLDMLEEASIQLSEATDELRHYHDRLDLDPNRLFELEQRISRQIXLARKHQITPEELPEFYQSLLEEQRLLDDSAGSLESLSQMVVEHHQLALETAKQLHALRQNSADELTRLITESMHSLSMPHGVFSIDVAFDERHLTAEGADHIEFRVTTNPGQPLQPIAKVASGGELSRIALAIQVITARKMETPALIFDEVDVGISGPTAAVVGKLLRQLGESTQVMCVTHLPQVAGCGHHHFFVCKETDGEMTETHMHPLDKRARLQELARLLGGSEVTRNTLANAKELLAA

SEQ ID NO: 6569 - DNA, 594 bp, Klebsiella oxytoca
  misc_feature (13)..(13): n is a, c, g or t
atgaagctaattnttgggatgaccggagcgacaggcgctccgttgggggttgcgctgcttaaagcgctgcgtgagatgccggaagtggaaacgcatctggtgatgtcaaagtgggccaaaacgaccattgagctggaaacgccttacagcgcccgtgaagtcgccgcactggccgatttctcccatagcccggcggatcaggccgccgtcatctcatcaggttcatttcgcaccgacggcatgattgttattccctgcagtatgaaaacgctggcgggtattcgtgccggttatgccgaggggctggttggccgggccgcggacgtggtgctgaaagaggggcgtaagctggtactggtaccgcgcgaaatgccgttaagcactatccatctggaaaacatgctggccctgtcacgcatgggggtggcaatggtgccgcccatgcccgcttattacaaccatcctaaaaccattgaggacgtcacggaccacgttgtcacgcgagtgctggatcagttcggtctggagtatcacaaagcgcgccgctggagcgggttacgggcggtagagaatgtttcacaggagaatgaataa

SEQ ID NO: 6570 - protein, 197 aa, Klebsiella oxytoca
  misc_feature (5)..(5): Xaa can be any naturally occurring amino acid
MKLIXGMTGATGAPLGVALLKALREMPEVETHLVMSKWAKTTIELETPYSAREVAALADFSHSPADQAAVISSGSFRTDGMIVIPCSMKTLAGIRAGYAEGLVGRAADVVLKEGRKLVLVPREMPLSTIHLENMLALSRMGVAMVPPMPAYYNHPKTIEDVTDHVVTRVLDQFGLEYHKARRWSGLRAVENVSQENE

SEQ ID NO: 6571 - DNA, 1344 bp, Klebsiella oxytoca
  misc_feature (482)..(482): n is a, c, g or t
atggcgcaattctactctgcaaaacggcgtgtgacgacgcgccagatcataaccgttacagtaaatgaccttgatccctttgggcagggcgttgcgcgtcaccagggtaaggcgctgtttgttaacggtttattaccgcaggagcaggccgaagtggtcctggtcgaggataaaaaacagtatgcccgcgcgcaggttaaacgccgtcttagcgacagcctgcagcggcaggcgccgcgctgtccgcattttggtatctgcggcggatgtcagcagcagcacgccagcgttgagctgcagcagcagagcaaacgcgccgccctcgcgcggttaatgaagcgcgaggttgatgacattatagccgcttcgccgtggggctatcgccgccgggcgcgtctgagcttgaattatcagccaaagacccaacaattacagataggcttccggaaggccaactccagcgaaattgttgatgtggtgcngtgccctgttttggtgcccactcttggtgcgctactgcccgcggtacgagaatgtctcagcggattgcaatcgctgcgtcagcttggccacgtggagctggtgcaggctgacaacggcccgctgatggttttacgccataccgcggcccttccggctgcagataaagaaaagctggaacgtttttcgcaatctcacggtctttcactgtatctcgccccgcaaagcgagatactggaacagattcgcggggaagcgccctggtatacgtccgacggtctacgcttagtgttcagtccgcgcgactttattcaggtcaacgacggcgtaaaccagctcatggtgcatacggcgctggaatggctggatatccagcctcaggatcgcgtgctggatctcttttgcggcatgggcaactttaccctgccgctggcaaagcgcgcggcgcaggtcgtgggggttgaaggtgttccggcgctggtggcgaaggggcaagaaaacgcggcgctgaacgcgttgcataatgtgacgttctttcatgaaaatcttgaagaggacgtcacccgccaggcgtgggcgaagcacggttttgataaagttctgctcgacccggcgcgcgccggtgcggcgggcgttatgttacatataattaaattagcgccgcgtcgggtggtgtatgtttcttgtaatccggcgactctggcgcgcgatagcgacgttttattgcaggcgggatataccattcaacgcctggcgatgctggatatgttcccgcataccggtcatctggaatcaatggtgttgtttgagcacaagaatcattcaaatcgcagtgcagcggcatccacaggcgcaggcgactga

SEQ ID NO: 6572 - protein, 447 aa, Klebsiella oxytoca
  misc_feature (161)..(161): Xaa can be any naturally occurring amino acid
MAQFYSAKRRVTTRQIITVTVNDLDPFGQGVARHQGKALFVNGLLPQEQAEVVLVEDKKQYARAQVKRRLSDSLQRQAPRCPHFGICGGCQQQHASVELQQQSKRAALARLMKREVDDIIAASPWGYRRRARLSLNYQPKTQQLQIGFRKANSSEIVDVVXCPVLVPTLGALLPAVRECLSGLQSLRQLGHVELVQADNGPLMVLRHTAALPAADKEKLERFSQSHGLSLYLAPQSEILEQIRGEAPWYTSDGLRLVFSPRDFIQVNDGVNQLMVHTALEWLDIQPQDRVLDLFCGMGNFTLPLAKRAAQVVGVEGVPALVAKGQENAALNALHNVTFFHENLEEDVTRQAWAKHGFDKVLLDPARAGAAGVMLHIIKLAPRRVVYVSCNPATLARDSDVLLQAGYTIQRLAMLDMFPHTGHLESMVLFEHKNHSNRSAAASTGAGD

SEQ ID NO: 6573 - DNA, 2223 bp, Klebsiella michiganensis
  misc_feature (407)..(407): n is a, c, g or t
atggaggtgcctgtgccgcggattttgttcctgctcgctttactcttcaccgctccgctatgggccgcgacgctgcccggcgttccggcaaccacaacggaccactccagcagtagcgaacccgatctggcgcagaaaaaagcggcctacggcgcgctggccgacgtgcttgaaaacgccgatgcccgccaggagcttatcgatcagctgcgtaaagccgccgccacgccgccgccggacagtaccccgacgctgacgccgccggaaattaaagacgaaacgacggtgctggaaaacgtcactcagatcagtcgtgaatatggcgaacagctttcgtcgcgcttctcccagctatggcgcaacatcaccggctctccgcacaaaccatttaattcgcaatcgttcancagcgccgcctggcatttcctgctgcttggtggtctggtctttgcattctggtggctggtacgcctggctgccctgccgctgtatcgcaaaatggggcactggggacgacataaaaaccgcgaccgcagcaactggctacagctgccggccacgattgccggcgcatttattttcgacctgcttctgctggccctgacgctgtttgttggccagctattaagcgatcgcctgaacggtaataatcccactatcgccttccagcaaagtctgtttctcaatgcctttgcgctgatcgagtttttcaaagccattctgcggctgattttctgcccacgcatcccggagctacgcccgtttaaccttagcgatgaagcggcaaaatactggaatctgcgcctcagcgcgctcagcagcctgattggctacgggctgatcgttgcggtgccaattatctccaaccaggtcaacgtgcagttcggggcgctggccaatgtggtcattatgctatgcattacgctctgggccctgtatctgatattccacaataagcagttaattacccaagggcttatccatcttgccgaccgatcgctggccttttttagcctgtttatccgcgcctttgctctggtgtggcactggctggcctgcgcctatttcatcgtgctgtttttcttctcgctgttcgaccccggtaacagcctgaaatttatgatgggcgcgaccctacgcagcctggccatcgtcggcgccgccgcgctggtctccggtattctgtcgcgctggattgcgaaaaccatcaccttgtcgccggaaacccagcgtaactatcctgaactgcaaaaacggcttaacggctggatctccgcatcgctgaaggccgcgcgcatcctgacggtctgcgtggcgattatgctgctgctcagcgcatgggggctgttcgatttctggcagtggatgcataacggcagcgggcaaaaagcggttgatgtgctgattcgtatcgcgctgatcctgttcttctcggcgattggctggacgctgctcgccagcctgattgaaaaccggctggcatcggacattcacggtcgcccgctgcccagcgcccgcgcccgaacgctgctgacgctgtttcgcaacgcgctggcggtggtgatcagcactattaccattatgatcctgctttcggaagtgggggtgaatatcgccccgctgctggccggcgccggcgcgctgggcctggcaatttcatttggcgcgcagaccctggtcaaagatattattaccggcatttttattcagttcgagaacggtatgaataccggcgacctggtgacgatcggaccgctcaccgggacggtggagcgcatgtcgattcgctccgtcggcgtccgtcaggataccggcgcttaccatattattccgtggtcttcgataaccaccttcgccaacttcgtacgcggaatcggctcggtggtggccaactatgacgttgaccggcatgaagatctggataaggctaaccaggcgctgaaggatgcggtcgcggaagtgatggcgcaggaagagattcgcgggcttatcattggcgagccatccttcaccggcgtggtaggcttaagcaataccgccttcaccctgcgcgtcacctttaccaccctgccgctcaagcagtggacggtcagattcgccctcgatacgcaggtgaaaaggcattttgacctcgcaggcgtgcgggcgccggtacaaacttatcaggttctgccgatgccagcacccgcaggaccgcctgcccccgccgagcccacgttatag

SEQ ID NO: 6574 - protein, 740 aa, Klebsiella michiganensis
  misc_feature (136)..(136): Xaa can be any naturally occurring amino acid
MEVPVPRILFLLALLFTAPLWAATLPGVPATTTDHSSSSEPDLAQKKAAYGALADVLENADARQELIDQLRKAAATPPPDSTPTLTPPEIKDETTVLENVTQISREYGEQLSSRFSQLWRNITGSPHKPFNSQSFXSAAWHFLLLGGLVFAFWWLVRLAALPLYRKMGHWGRHKNRDRSNWLQLPATIAGAFIFDLLLLALTLFVGQLLSDRLNGNNPTIAFQQSLFLNAFALIEFFKAILRLIFCPRIPELRPFNLSDEAAKYWNLRLSALSSLIGYGLIVAVPIISNQVNVQFGALANVVIMLCITLWALYLIFHNKQLITQGLIHLADRSLAFFSLFIRAFALVWHWLACAYFIVLFFFSLFDPGNSLKFMMGATLRSLAIVGAAALVSGILSRWIAKTITLSPETQRNYPELQKRLNGWISASLKAARILTVCVAIMLLLSAWGLFDFWQWMHNGSGQKAVDVLIRIALILFFSAIGWTLLASLIENRLASDIHGRPLPSARARTLLTLFRNALAVVISTITIMILLSEVGVNIAPLLAGAGALGLAISFGAQTLVKDIITGIFIQFENGMNTGDLVTIGPLTGTVERMSIRSVGVRQDTGAYHIIPWSSITTFANFVRGIGSVVANYDVDRHEDLDKANQALKDAVAEVMAQEEIRGLIIGEPSFTGVVGLSNTAFTLRVTFTTLPLKQWTVRFALDTQVKRHFDLAGVRAPVQTYQVLPMPAPAGPPAPAEPTL

SEQ ID NO: 6575 - DNA, 1032 bp, Klebsiella michiganensis
  misc_feature (334)..(334): n is a, c, g or t
atgtgcgattcggatcggcgacggtccgagggacaacataataaagaaaagcagggcatgcgccaccggatcccggtggcgcgctttccgggaatattgattatgaaaaccgcaggcaaacttgtcgtccttggcagtatcaacgccgatcacatcctgaatctcgacgccttcccaacgcctggtgaaaccgttaccggtcatcactatcaggtcgcttttggcggtaagggcgcaaaccaggccgttgctgccggacgcagcggggctaatatttcctttatcgcctgtaccggcgatgacgacattggcgagcgcgttcgtcaccagctgnaaagcgacaatattgacgtttcgccggtcagagccgtcaccggagaatcaaccggcgtggcgctgatttttgttaacgctgaaggtgagaatactatcggtattcatgccggtgctaatgccgcgctctccgttgcgcaggttgatgcggaaaaagagcgtattgctggcgcgcaggcgctgctgatgcagctggaatcaccgctggaaagcgtactggccgcggcgaaaatcgctcaccagaatcaaacctcagtcatcctcaatccggcgccggcacgtgaattgcccgatgagctgctcacgctggtagatatcattacccctaacgagaccgaagcggaaaagctcaccggcgtgcgcgtggaaagcgacgatgatgcggcaaaagccgccaaagtgctccatgataaaggtatcggtacggtgatcattacccttggcagccgtggcgtatgggccagctgcgaaggtgaaggtcgtcgggtgcccggctttaaagtgcaggcggtagataccatagccgctggcgatacctttaatggtgcgctggtcaccgcgctgcttgaaggtagtgaactggcgcaggcgattcgttttgcccatgccgccgccgctatcgccgtcacccgcaaaggggcccagccctccgtgccctggcgaaaagaaatagacgaatttttacgtcaacaggggtaa

SEQ ID NO: 6576 - protein, 343 aa, Klebsiella michiganensis
  misc_feature (112)..(112): Xaa can be any naturally occurring amino acid
MCDSDRRRSEGQHNKEKQGMRHRIPVARFPGILIMKTAGKLVVLGSINADHILNLDAFPTPGETVTGHHYQVAFGGKGANQAVAAGRSGANISFIACTGDDDIGERVRHQLXSDNIDVSPVRAVTGESTGVALIFVNAEGENTIGIHAGANAALSVAQVDAEKERIAGAQALLMQLESPLESVLAAAKIAHQNQTSVILNPAPARELPDELLTLVDIITPNETEAEKLTGVRVESDDDAAKAAKVLHDKGIGTVIITLGSRGVWASCEGEGRRVPGFKVQAVDTIAAGDTFNGALVTALLEGSELAQAIRFAHAAAAIAVTRKGAQPSVPWRKEIDEFLRQQG

SEQ ID NO: 6577 - DNA, 876 bp, Klebsiella michiganensis
  misc_feature (641)..(641): n is a, c, g or t
atgacatctcgctacatcgcaattgactggggatcgacaaacctgcgcgcctggctttatcagggcgagcagtgtctggagagcaggcaatctgaagcaggcgttacgcgcctgaacggacactcccccgcagcggtgtttagcgaaataaccgcgggctggcgcgacagcgctaccccggtagtgatggcgggaatggtcggcagtaatgtcggctggaaggcggcgccctacctgccggttcccgtccatttttccgccattggcgaacaattaaccgccgttagcgaccagatctggattattcccggactcagcgtctctcgcgacgataaccataatgtgatgcgcggcgaagagactcagctcctcggcgcgcgggcaatagctccttcctccgtctacgttatgcccggcacccactgcaaatgggtgcaggctgaccgccaacaaattagcgactttcgcacggtgatgaccggcgaactccaccacctgctgctgcgccactcgctggtcggcgccgggttaccggagcaggtctcagctcctgacgcgtttaacgccgggcttgagcgcggcctgcattcgccagacatcctgccgcagctttttgaggtacgcgctgcgcacgtgctggnctcactgccgcgcgaacaggtgagcgaatttctctccggcctgctgattggcgcggaagtcgccaccatgagcgcacatttccacgatcgccaggtcaccctcgttgccggagaggcgctggcagaccgctatcagcaggcgcttggcgctattggccgtcaggcaaccgtggtgtcaggcgacaccgcatttcagaccggaataaggagcatcgcccatgcagtggcaaactaa

SEQ ID NO: 6578 - protein, 291 aa, Klebsiella michiganensis
  misc_feature (214)..(214): Xaa can be any naturally occurring amino acid
MTSRYIAIDWGSTNLRAWLYQGEQCLESRQSEAGVTRLNGHSPAAVFSEITAGWRDSATPVVMAGMVGSNVGWKAAPYLPVPVHFSAIGEQLTAVSDQIWIIPGLSVSRDDNHNVMRGEETQLLGARAIAPSSVYVMPGTHCKWVQADRQQISDFRTVMTGELHHLLLRHSLVGAGLPEQVSAPDAFNAGLERGLHSPDILPQLFEVRAAHVLXSLPREQVSEFLSGLLIGAEVATMSAHFHDRQVTLVAGEALADRYQQALGAIGRQATVVSGDTAFQTGIRSIAHAVAN

SEQ ID NO: 6579 - DNA, 1146 bp, Klebsiella oxytoca
  misc_feature (676)..(676): n is a, c, g or t
atgccttttcgcgctacgcttttgaccctcaccctgctggccgccgccagcgtcaacgcgagcgactggcagcgccagggcgtcgtagaaggcaatttacccgcctcctggcaacagttgaaagcgcagatgacgtatccggactcgtggctctctggaaagtatcgtcatttcgatcaatggcgagagcacgcccgcacgctgcttcggcaatccctgctaacgccgacatcagcaagcccgttcaccccacaaacgctgatgagcgaagatcggggcacctatcgcgccgagaaactggcatttaacgtcacagatgaaaaccggattgccgctctgatgttaacgcccaaatcagcaggccctcacccggccattgtcctgctgcacgaccatggctcaaaatttgacataggcaaggagaaactgattcgtcctttgcgggatgccgcacgcctggccagcgccgaggcatgggcagataaatttttcagcggtcggttcatcggcgatgagctggcgcagcgcgggtatgttgtcatcgccattgatagcccgggctggggggatcgcggccccatgacctacgagcagcagcaggcgctggccagtaactattttaaccttgggcgctcgctggcaggggaagtcgcctatgaagatctgcgaaccgtgnatttcgtcagtacgttaaaagaggttgataataaacgcatcggggtactgggtttttcaatgggcggttttcgcgcctggcaactggccgccctgtctgacaaagtcgccgccactgccgcgatctcctggttcggtacctggaacggcctgatgcagccaggcaacaacgttctgcgcggtcaatcggcgttttatatgcttcatccgggcctggccggacatcttgatattcccgacatcgccagcattgcagcgcccaggccgatgctgatttatagcggagggcaggataagctgtttcccgctgcagccgttaatgacgccttcgctaaggtgcataacgtatgggcgtcacagaacgcgcaggataagctggagaccagaacgtggccggaactgggccacgtcttttatcaagaacagcaggatgaagtgttcccctggcttgataagtggctcaagccctga

SEQ ID NO: 6580 - protein, 381 aa, Klebsiella oxytoca
  misc_feature (226)..(226): Xaa can be any naturally occurring amino acid
MPFRATLLTLTLLAAASVNASDWQRQGVVEGNLPASWQQLKAQMTYPDSWLSGKYRHFDQWREHARTLLRQSLLTPTSASPFTPQTLMSEDRGTYRAEKLAFNVTDENRIAALMLTPKSAGPHPAIVLLHDHGSKFDIGKEKLIRPLRDAARLASAEAWADKFFSGRFIGDELAQRGYVVIAIDSPGWGDRGPMTYEQQQALASNYFNLGRSLAGEVAYEDLRTVXFVSTLKEVDNKRIGVLGFSMGGFRAWQLAALSDKVAATAAISWFGTWNGLMQPGNNVLRGQSAFYMLHPGLAGHLDIPDIASIAAPRPMLIYSGGQDKLFPAAAVNDAFAKVHNVWASQNAQDKLETRTWPELGHVFYQEQQDEVFPWLDKWLKP

SEQ ID NO: 6581 - DNA, 861 bp, Klebsiella oxytoca
  misc_feature (743)..(743): n is a, c, g or t
atgaagaacatcctcgccatccagtcccacgttgtgtttggccatgcgggcaacagcgccgctgaatttccgatgcgccgccttggcgccaacgtctggccgcttaataccgtacaattctccaatcatacccaatacggtaaatggaccggctgcgtgatgccgccagcgcatttgacggagattgttcaggggattgccgatattaaccaactgcagcgctgtgacgccgtgctaagcggctatctgggatcggctgaacagggcgaacatattcttggcattgtgcgtcaggttaaagccgccaatccggctgcgaaatatttctgcgacccggtaatgggtcatccggaaaagggctgcatcgtggcgccgggcgtagcggagtttcacgtgcgctacgcgctgccggcaagcgatattattgcgccaaatctgattgagctggagatcctctgcgggcatccggtggcaaacgttaacgaggcggttttggccgcgcgcgagctgattgctcaggggccggaggtggtgctggtgaagcatctctcgcgtgccggactgagtatggatcgttttgagatgctgctggttaccgcgcaggaagcctggcatatcagccgtccgctggtggattttggcatgcgccagccggtaggcgtcggtgacgttaccagcgggttgctgctggtcaaactgctgcagggcgccactctgcgcgatgcgctggagcatgtgaccgncgcggtttatgaaatcatgctggcgactaaaaacatgcaggaatatgagcttcaggttgtggcggctcaggatcgtattgcgcagccggagcactactttagcgccacccagctttaa

SEQ ID NO: 6582 - protein, 286 aa, Klebsiella oxytoca
  misc_feature (248)..(248): Xaa can be any naturally occurring amino acid
MKNILAIQSHVVFGHAGNSAAEFPMRRLGANVWPLNTVQFSNHTQYGKWTGCVMPPAHLTEIVQGIADINQLQRCDAVLSGYLGSAEQGEHILGIVRQVKAANPAAKYFCDPVMGHPEKGCIVAPGVAEFHVRYALPASDIIAPNLIELEILCGHPVANVNEAVLAARELIAQGPEVVLVKHLSRAGLSMDRFEMLLVTAQEAWHISRPLVDFGMRQPVGVGDVTSGLLLVKLLQGATLRDALEHVTXAVYEIMLATKNMQEYELQVVAAQDRIAQPEHYFSATQL

SEQ ID NO: 6583 - DNA, 1086 bp, Klebsiella oxytoca
  misc_feature (1052)..(1052): n is a, c, g or t
atgagcattcaatttctcggcatgatcggccaccgcctgtcgtcggaaaccatcgccccggtcggccccatttttgaccgcgattacatcgtgcgtttcgcgcaaacccacgaggccgccgggtttgaccgcctgctggtaggccactggtccgatcaacccgacggatttctggtgaccgcgctggcgggcctgtcgacgcaaaagatcggcttcctgttggctcatcgtcccggttttgtctcgccgaccctcgctgcgcgtaagttcgctacccttgaacatctgctgggcggacggctggctgtgcatatcatcagcggcggcaatgacgccgagcagcgccgcgacggcgattatctcgatcacgaccagcgctatgcgcgcaccgatgccttccttgagacccttcgcacggtgtggaccgccgaacagccggtggatatcgccaatgacttttatcaggcggaacaggcgtggtcggcgatacgcccgctgcaaaaaccgcatatccctctctacttcggcggctcgtcggaagccgctatcgccgtggccggcaaacacgccaatgttttcgctctgtggggtgagtcgctggcgcaaaccgaggaaaccatccagcgcgtgcgggccgaggcggcgaaacatcagcgagaaatcgacttcagcgtctcgttccggccgattatcgccgcgaccgaagctgaggcctgggaaaaagccgagcatattctgcacgtcgccaccgaacgggcggcgcagagcggggacggcttcaaagccaagcccgacagcgtcggggcgcagcgtctacgggccaccgcagcgcagggcaaggtggtagataaacgtctgtggaccggaattgcgcagctggtgggcggcggccacaactctaccgcgctggtaggcactccggaacaggttgctgacgcgctgctcgattattacgacctcggcgtgcgcaacttcctgatccgcggattcgatccgctcaacgatgcccaggagtacggtaaagcgctgctgccgatcgcccgcgaaaaagnggccctgcgcgccgcggcggagcgcgcatcgtga

SEQ ID NO: 6584 - protein, 361 aa, Klebsiella oxytoca
  misc_feature (351)..(351): Xaa can be any naturally occurring amino acid
MSIQFLGMIGHRLSSETIAPVGPIFDRDYIVRFAQTHEAAGFDRLLVGHWSDQPDGFLVTALAGLSTQKIGFLLAHRPGFVSPTLAARKFATLEHLLGGRLAVHIISGGNDAEQRRDGDYLDHDQRYARTDAFLETLRTVWTAEQPVDIANDFYQAEQAWSAIRPLQKPHIPLYFGGSSEAAIAVAGKHANVFALWGESLAQTEETIQRVRAEAAKHQREIDFSVSFRPIIAATEAEAWEKAEHILHVATERAAQSGDGFKAKPDSVGAQRLRATAAQGKVVDKRLWTGIAQLVGGGHNSTALVGTPEQVADALLDYYDLGVRNFLIRGFDPLNDAQEYGKALLPIAREKXALRAAAERAS

SEQ ID NO: 6585 - DNA, 1191 bp, Klebsiella oxytoca
  misc_feature (850)..(850): n is a, c, g or t
atgctcgacgcccagaccatcgctacggtgaaagccaccatccccctgctggttgaaaccggtccaaaactgaccgctcatttttacgaccgcatgtttgctcacaatcccgaattaaaagaaatcttcaatatgagcaatcagcgcaacggcgaccagcgcgaggcgctgttcaacgctattgccgcctatgcaagcaatctcgagaacctgcccgccctgctgccggcggtagagaaaatcgcccagaagcacaccagcttccagattcaacccgagcagtacaatattgttggtactcacctgctggcgaccctcgatgagatgttcagtccgggccaggaagtactggatgcctggggcaaggcctacggggtgctggccaacgtctttattaatcgtgaagcgcaaatctataacgaaagcgccagcaaaaccggcggctgggaaggcacccgcgcattccgcatcgtcaaaaaaacgccgcgcagcgcgctgattaccagctttgaatttgagccggtcgacggcggcgcggtagcggaatatcatccaggccagtatctggcggtctggctgaagccggaaggttttccgcatcaggaaattcgccagtactctttgacccgcaaacccgacggtaaaggctatcgtatcgcggttaaacgtgaaaacggcggccaggtttcaaactggctgcatgattcagcgaaagaaggcgacgtgatttatctggccgcgccggccggtgatttcttcctcaacgtggcgccggaaaccccggtcacgctgctctccggcggcgtcggtcagacgccgatgctggcgatgctggatgtgctggcaaaancgcagcatccggcgcaggtgaactggttccatgcggcagagaacggcgacgtacacgccttcgcggacgaagttaaaacgctgggtgaaacgctgccgaagtttacttctcacgtctggtaccgcagcccgagcgaagcggaccgtgaatccggcgcgtttgatagtgaaggtttgatggatttaacggcgctggccgacaagatcggcgacccgcaaatgcagttctatctctgcggcccggtggcgtttatgcagtttgccgcgaagcagctggtagatctgggcgtgagcagcgacaacattcattatgagtgcttcggcccgcataaggtgctgtaa

SEQ ID NO: 6586 - protein, 396 aa, Klebsiella oxytoca
  misc_feature (284)..(284): Xaa can be any naturally occurring amino acid
MLDAQTIATVKATIPLLVETGPKLTAHFYDRMFAHNPELKEIFNMSNQRNGDQREALFNAIAAYASNLENLPALLPAVEKIAQKHTSFQIQPEQYNIVGTHLLATLDEMFSPGQEVLDAWGKAYGVLANVFINREAQIYNESASKTGGWEGTRAFRIVKKTPRSALITSFEFEPVDGGAVAEYHPGQYLAVWLKPEGFPHQEIRQYSLTRKPDGKGYRIAVKRENGGQVSNWLHDSAKEGDVIYLAAPAGDFFLNVAPETPVTLLSGGVGQTPMLAMLDVLAKXQHPAQVNWFHAAENGDVHAFADEVKTLGETLPKFTSHVWYRSPSEADRESGAFDSEGLMDLTALADKIGDPQMQFYLCGPVAFMQFAAKQLVDLGVSSDNIHYECFGPHKVL

SEQ ID NO: 6587 - DNA, 1608 bp, Klebsiella oxytoca
  misc_feature (671)..(671): n is a, c, g or t
atgcaaagcgatacgcaacatattattggcgtcgatgttggctcaggcagcgttcgcgccggcgtgttcgacctgcgtggcgaacttctcgcccacgcaacccgggaaattaccctgtttcgcagcgccggaagcgtggtcgaacagtcaagccgcgagatctggcaggcggtgtgctactgcattaaaacggcggtggccagcgccggagtcgctccatcgtcgattgccgggatcggcttcgatgccacctgctcgctggtagtgattggcgataacgacgtgccgctggcggtcgggccttcggaagatgcggaccgtaacattattgtctggatggatcatcgcgccaccggccaggcggaaaagattaacgctacgggccacgcggtgctgcagtacgttggcggcaaaatctcgccggagatggaaacgccgaaaattctctggctgaaggagaaccgcccgcacatttatcagcaggcgcgccacttcttcgacctcgccgattatctcacctggcgctcgaccggcgatttagcccgctcagtctgtactgtgacctgtaaatggacctacctggcgcatgaacaacgctgggatgccagctacttccgccagattggcctcgaagagctggcggatgaagattttgtccgcatcggccagcngattgtcgatccgggaaccccctgcggcgacggcctttgcgccacggcggcagaggagatggggctgccgatcggtacgccggtagcggtcggtatgattgacgcccacgcgggcggcatcggcaccgtcggcgtgcttaacggcgcggttaacaatatggcctacgtcttcggtacctcctcctgcaccatgaccactactcaggaagcggtattcgtgcccggcgtctgggggccgtattactcggcgatggtgccagggttctggctgagtgaaggtggtcagagcgcggccggagcggccatcgaccagctgctgagcttccaccccgccgccgcagaagctaagtcgctggccaaagcgcgcggcgtcccgctaccggtttatcttgccgatagcgtgctggcgaaggtagataatccgtcagcggcggtcaaacttgccgacggcctgcacgtggtgcccgagtttttaggtaaccgggcgccgctggccgatccgcaggcgaaagcgattatcgccgggctggggatggagcgggatctggacaatctgatggcgctctacgtcgccggattgtgcggcatcggctacggtctgcggcagattattgacgcccagaaggcgtgcggcatccgcagcgagaatatcgtcatcagcggcggggccggtcagcatccgctggtgcgccagctgctggcagacgcctgcggagtgaacgtggtgagtaccgaatccagtgaaccagtgctattaggttcggcgattcttggcgcggtggccggtcatatcgcgccttccctgccagaagcgatgaagcagtttacccgggtggataaaacctaccgctgcgtagaacaatttagcgccgatcatcagcggcgctatgaggcgtataaaatgctacagcacacggcgcggctgattcgcgagtaa

SEQ ID NO: 6588 - protein, 535 aa, Klebsiella oxytoca
  misc_feature (224)..(224): Xaa can be any naturally occurring amino acid
MQSDTQHIIGVDVGSGSVRAGVFDLRGELLAHATREITLFRSAGSVVEQSSREIWQAVCYCIKTAVASAGVAPSSIAGIGFDATCSLVVIGDNDVPLAVGPSEDADRNIIVWMDHRATGQAEKINATGHAVLQYVGGKISPEMETPKILWLKENRPHIYQQARHFFDLADYLTWRSTGDLARSVCTVTCKWTYLAHEQRWDASYFRQIGLEELADEDFVRIGQXIVDPGTPCGDGLCATAAEEMGLPIGTPVAVGMIDAHAGGIGTVGVLNGAVNNMAYVFGTSSCTMTTTQEAVFVPGVWGPYYSAMVPGFWLSEGGQSAAGAAIDQLLSFHPAAAEAKSLAKARGVPLPVYLADSVLAKVDNPSAAVKLADGLHVVPEFLGNRAPLADPQAKAIIAGLGMERDLDNLMALYVAGLCGIGYGLRQIIDAQKACGIRSENIVISGGAGQHPLVRQLLADACGVNVVSTESSEPVLLGSAILGAVAGHIAPSLPEAMKQFTRVDKTYRCVEQFSADHQRRYEAYKMLQHTARLIRE

SEQ ID NO: 6589 - DNA, 735 bp, Klebsiella oxytoca
  misc_feature (5)..(5): n is a, c, g or t
atgantcagaacatctatgacgatcccgctttttttgccggatacgccaccctcgaccgttcagttaaggggctggaaggcgcgcctgagtggccaaccatacagcaaatgcttccgccgttatccggtttacgcgtcgtcgatcttggctgcggctacggctggttttgccgctgggcccgcgatcggggcgccgcgcaggtcgagggactggatctctccagccggatgctggagcgtgcccgcgaaatgacccgcggcgaaggtatccgctaccgctgtgaaaacctggagaacctgaccctgcccgcaaatagctgcgagctggtctatagctcgctggcgctacactatctgcccgacgtggcgccgctgttcgctaccgtttaccaggcgctgacgcccggcggtacgctgctgttctccgccgagcatcccatctataccgccccgccgcagcagggctggctggaagatgagaacggacagaagcgctggccggtgagccactaccagcaggagggcgaacgtatcagcaactggtttgccgacggggtgaagaagcagcaccgcaagctgtccacctggataaacctgctggtggccgccggttttatcatcgagcatctggatgaatgggggccaacggcggagcagattgccgcccagccagcgctggatgaagaaaaagagcggccgatgatttttctgctgcgcgcgcgcaagccggcgtaa

SEQ ID NO: 6590 - protein, 244 aa, Klebsiella oxytoca
  misc_feature (2)..(2): Xaa can be any naturally occurring amino acid
MXQNIYDDPAFFAGYATLDRSVKGLEGAPEWPTIQQMLPPLSGLRVVDLGCGYGWFCRWARDRGAAQVEGLDLSSRMLERAREMTRGEGIRYRCENLENLTLPANSCELVYSSLALHYLPDVAPLFATVYQALTPGGTLLFSAEHPIYTAPPQQGWLEDENGQKRWPVSHYQQEGERISNWFADGVKKQHRKLSTWINLLVAAGFIIEHLDEWGPTAEQIAAQPALDEEKERPMIFLLRARKPA

SEQ ID NO: 6591 - DNA, 1758 bp, Klebsiella oxytoca
  misc_feature (1037)..(1037): n is a, c, g or t
atgacatttacattacgtccctaccaaaaagaggcggtcgacgccacgctcgcctggtttcgccgccatcatgaacctgccgcgattgtcctgccaacaggcgcaggtaaaagcctggtcattgctgaactcgcacgcctggcgcgcggtcgcgtgctggtgctggcgcacgtaaaagagctggtggcgcagaaccacgccaagtattgcgcgctcggtctggaagcggatattttcgccgcgggccttaaacggaaagagagccacggtaaagtggtctttggcagcgtgcagtcggtagcccgtaaccttgaccagtttcagggggagttctcgctgctgatcgtcgacgagtgtcaccgcatcggcgacgataatgacagccagtatcagcagattatcagccaccttcagcaggtcaatccgcatctgcgcctgctggggctgaccgcaacgccgtttcgcctgggtaaaggttggatttatcagtttcactatcacggcatggtgcgcggtgatgaaaaagcgctgtttcgcgactgcatttatgaactgccgctgcgctatatgattaagaatggctacctgacgccgccggagcggctggacatgccggtggttcaatacgacttcagccgtttacaggcgcaaagtaacggcctgttcagcgaagccgatctgaatcacgagctgaaaaagcagcagcgcgtcacgccgcatatcgtcagccaaatcgttgaattcgccgaaacgcgcaaaggggtgatgattttcgccgccaccgttgaacacgcccgtgaagtgaccgggttgcttccgcagggcgaggcggctcttatcaccggtgaaacgccggggccggagcgcgatcgcatcatcgaagcgtttaaagcgcagcagtaccgctatctggttaacgtcgcggtgttgacgaccggctttgatgcgccgcatgtcgatctgatcgccatcctgcgcccgaccgagtcggtgagcctttaccaacagatcgtcggccgtggcctgcgcctggcgcngggtaaaactgactgcctgattctcgattacgccggcaatcctcacgacctttatgcccctgaagtgggaacgccgaaaggaaaaagcgacaacgttccggtccaggttttttgtccggcatgcggtttcgccaataccttctggggaaaaactaccgctgacggcacgctgattgaacactttggccgccgctgccagggctggtttgaggatgacgaaggccatcgtgaacagtgcgattttcgttttcgctttaaaaactgcccgcagtgtaacgcggaaaacgatatcgccgcccgccgctgccgcgagtgcgataccattctggtcgaccccgatgatatgctgaaagccgcgctgaagctcaaagatgcgctggtgctgcgctgtagcggtatggttcttcagcacggtgcggatgacaaaggcgcctggttaaaaatcacctattacgatgaagatggcgcggatgttagtgagcgcttccgcctgcatacgcccgcccagcgtaccgcctttgagcagctctttatccgaccgcatacccgaacgccgggcgtgccgctgcgctggataacgcctgccgatatcctcgcccagcaggcgcttctgcgccacccggactttgtcgttgcccgcatgaaggggcaatactggcaggtccgggagaaagtgtttgattatcaggggcgattccgccgggccaacgaactgcgctaa

SEQ ID NO: 6592 - protein, 585 aa, Klebsiella oxytoca
  misc_feature (346)..(346): Xaa can be any naturally occurring amino acid
MTFTLRPYQKEAVDATLAWFRRHHEPAAIVLPTGAGKSLVIAELARLARGRVLVLAHVKELVAQNHAKYCALGLEADIFAAGLKRKESHGKVVFGSVQSVARNLDQFQGEFSLLIVDECHRIGDDNDSQYQQIISHLQQVNPHLRLLGLTATPFRLGKGWIYQFHYHGMVRGDEKALFRDCIYELPLRYMIKNGYLTPPERLDMPVVQYDFSRLQAQSNGLFSEADLNHELKKQQRVTPHIVSQIVEFAETRKGVMIFAATVEHAREVTGLLPQGEAALITGETPGPERDRIIEAFKAQQYRYLVNVAVLTTGFDAPHVDLIAILRPTESVSLYQQIVGRGLRLAXGKTDCLILDYAGNPHDLYAPEVGTPKGKSDNVPVQVFCPACGFANTFWGKTTADGTLIEHFGRRCQGWFEDDEGHREQCDFRFRFKNCPQCNAENDIAARRCRECDTILVDPDDMLKAALKLKDALVLRCSGMVLQHGADDKGAWLKITYYDEDGADVSERFRLHTPAQRTAFEQLFIRPHTRTPGVPLRWITPADILAQQALLRHPDFVVARMKGQYWQVREKVFDYQGRFRRANELR

SEQ ID NO: 6593 - DNA, 1668 bp, Klebsiella oxytoca
  misc_feature (1658)..(1658): n is a, c, g or t
atgagtgaggcagaagcccgcccgactaactttattcgtcagatcattgatgaagatctggctactggtaagcacaccaccgttcatacccgttttccaccggaaccgaacggctatctgcacattggccacgcaaaatctatttgcctgaactttggtatcgctcaggattaccagggccaatgcaacctgcgtttcgatgacaccaacccggtgaaagaagatatcgaatacgttgagtcgattaaaaacgacgtgcagtggttaggtttccactggtccggggatgtttgctactcgtctgattatttcgatcagctgcaccagtatgcggttgaattaatcaataaaggcctggcctacgttgatgaactgtcagcggatgagatccgtgagtaccgcggcaccctgaaagagccgggtaaaaatagcccgtatcgcgatcgcagcgtggaagagaacctggcgctgtttgaaaaaatgcgtagcggtggatttgccgagggtaaagcctgcctgcgcgcgaaaatcgatatggcttcgccgtttatcgtgatgcgcgatccggtactgtaccgtattaagtttgccgatcaccatcagaccggaagcaagtggtgcatctacccgatgtacgactttacccactgcatcagcgatgcgctggaaggaattacccactctctgtgtactctcgagtttcaggataaccgccgcctgtacgattgggtgctggataacatcagcattcccgtgcatccgcgtcagtatgaattctcgcgcctcaaccttgaatacaccgtgatgtccaagcgtaagttgaatcagctcgtgacggaaaaacacgtcgaaggctgggatgacccgcgtatgccgaccatttccggcctgcgccgtcgcggctataccgcagagtctatccgcgagttctgcaaacgcatcggcgtgaccaagcaggacaacactatcgaaatcgctgccctggaatcctgcatccgcgaagatttgaacgaaaatgctccgcgtgccatggccgttatcgacccggttaagctggtgatcgaaaactatccgcagggcggcagcgaaatcgtcactatgccgaatcatcccaataaaccggagatgggcagccgcgaggtgccgttcagcggcgaaatctggatcgatcgcgccgatttccgcgaggaagcgaacaagcagtacaagcgtctggtgctgggcaaagaagttcgcctgcgcaatgcttacgtcatcaaagcggagcgcgtggagaaagatgcggaaggcaatatcaccacgattttctgtacctatgatgccgacaccctgagcaaagatccggccgacggccgcaaggtgaagggcgtgattcactgggtgagcgcggcgcacgcgctgccggtcgaaatccgtctgtacgatcgcctgttcagcgtaccgaacccgggcgcggcggaggatttcctctcggtgatgaacccggaatcgctggttatcaaacagggttttgccgagccaagcctggcgcaggcgcagccggaaaaagcgtatcagttcgagcgcgaagggtatttctgcctggatagccgctatgcaaccgcaaccaatctggtgtttaaccgcaccgtcggtctgcgcgatacatgggcaaaagncggcgcgtaa

SEQ ID NO: 6594 - protein, 555 aa, Klebsiella oxytoca
  misc_feature (553)..(553): Xaa can be any naturally occurring amino acid
MSEAEARPTNFIRQIIDEDLATGKHTTVHTRFPPEPNGYLHIGHAKSICLNFGIAQDYQGQCNLRFDDTNPVKEDIEYVESIKNDVQWLGFHWSGDVCYSSDYFDQLHQYAVELINKGLAYVDELSADEIREYRGTLKEPGKNSPYRDRSVEENLALFEKMRSGGFAEGKACLRAKIDMASPFIVMRDPVLYRIKFADHHQTGSKWCIYPMYDFTHCISDALEGITHSLCTLEFQDNRRLYDWVLDNISIPVHPRQYEFSRLNLEYTVMSKRKLNQLVTEKHVEGWDDPRMPTISGLRRRGYTAESIREFCKRIGVTKQDNTIEIAALESCIREDLNENAPRAMAVIDPVKLVIENYPQGGSEIVTMPNHPNKPEMGSREVPFSGEIWIDRADFREEANKQYKRLVLGKEVRLRNAYVIKAERVEKDAEGNITTIFCTYDADTLSKDPADGRKVKGVIHWVSAAHALPVEIRLYDRLFSVPNPGAAEDFLSVMNPESLVIKQGFAEPSLAQAQPEKAYQFEREGYFCLDSRYATATNLVFNRTVGLRDTWAKXGA

SEQ ID NO: 6595 - DNA, 405 bp, Enterobacter cloacae
  misc_feature (8)..(8): n is a, c, g or t
gtgaatanaacgctgtttcgatggccggttcgggtctactacgaagacaccgacgccggtggtgtggtttaccacgccagctacgtcgctttctatgaaagagcacgcacagagatgctgcgccatcatcacttcagccaacaggttttgctggctgaacgagttgcctttgtggttcgcaaaatgacgctggagtattttgcgcccgccagactcgacgacatgctcgaaatccagacggagataacctcaatgcgaggggcgaccctggttttcacgcagcgaatcgtcaacgccgagaacgtggttttgaatgaagctgaagttctgatcgtgtgcgttgatccactcttaatgaagcctcgtgcgcttcccaagtctattgtcgcggagtttaagcagtga

SEQ ID NO: 6596 - protein, 134 aa, Enterobacter cloacae
  misc_feature (3)..(3): Xaa can be any naturally occurring amino acid
MNXTLFRWPVRVYYEDTDAGGVVYHASYVAFYERARTEMLRHHHFSQQVLLAERVAFVVRKMTLEYFAPARLDDMLEIQTEITSMRGATLVFTQRIVNAENVVLNEAEVLIVCVDPLLMKPRALPKSIVAEFKQ

SEQ ID NO: 6597 - DNA, 858 bp, Klebsiella oxytoca
  misc_feature (289)..(289): n is a, c, g or t
atgaagaacaccagtaaattccagaatgtggtgattgccaccatagtgggttggcttgtgctgtttgtctttctgcccaacctgatgattatcgccaccagctttctgacccgcgacgataccaacttcgtcaagctggtctttacgctggataactacgcgcgcctgctcgatccgctctactacgacgtgctgctgcattcgttgaatatggcgttcatggcgaccctggcctgtctggcgcttggctaccctttcgcctggtttctggcaaggctgccggagaagntacgcccgctgatgctgtttctgctgattgtgccgttctggaccaattcgctgattcgtatctacggactgaaaattttcctcagcaccaagggctatctgaacgaatttttactatggctgggcgtcatcgatacgccgctgcgcatcatgtatacgccatcggcggtcattatcggcctggtctatattctgctgccgtttatggtgatgccgctctactccagcatcgaaaagctcgatcgtccgctgctggaagcggcgaaagatctcggcgccaataaactacaaacctttatccgcatcatcattccgctgaccatgccgggcattattgccggctgcctgctggtgatgcttccggcaatggggctgttctacgtgtctgacctgatgggcggcgcgaaaaacctactgattggtaacgtcattaagagccagttcctcaacatccgcgactggccgttcggtgcggcgaccagcattacgctaacgctggtgatgggcctgatgctgctgatttactggcgcgcagcgcgtttactgaataaaaaggtggagctggaatga

SEQ ID NO: 6598 - protein, 285 aa, Klebsiella oxytoca
  misc_feature (97)..(97): Xaa can be any naturally occurring amino acid
MKNTSKFQNVVIATIVGWLVLFVFLPNLMIIATSFLTRDDTNFVKLVFTLDNYARLLDPLYYDVLLHSLNMAFMATLACLALGYPFAWFLARLPEKXRPLMLFLLIVPFWTNSLIRIYGLKIFLSTKGYLNEFLLWLGVIDTPLRIMYTPSAVIIGLVYILLPFMVMPLYSSIEKLDRPLLEAAKDLGANKLQTFIRIIIPLTMPGIIAGCLLVMLPAMGLFYVSDLMGGAKNLLIGNVIKSQFLNIRDWPFGAATSITLTLVMGLMLLIYWRAARLLNKKVELE

SEQ ID NO: 6599 - DNA, 858 bp, Klebsiella oxytoca
  misc_feature (145)..(145): n is a, c, g or t
atgaagaacaccagtaaattccagaatgtggtgattgccaccatagtgggttggcttgtgctgtttgtctttctgcccaacctgatgattatcgccaccagctttctgacccgcgacgataccaacttcgtcaagctggtctttncgctggataactacgcgcgcctgctcgatccgctctactacgacgtgctgctgcattcgttgaatatggcgttcatggcgaccctggcctgtctggcgcttggctaccctttcgcctggtttctggcaaggctgccggagaagatacgcccgctgatgctgtttctgctgattgtgccgttctggaccaattcgctgattcgtatctacggactgaaaattttcctcagcaccaagggctatctgaacgaatttttactatggctgggcgtcatcgatacgccgctgcgcatcatgtatacgccatcggcggtcattatcggcctggtctatattctgctgccgtttatggtgatgccgctctactccagcatcgaaaagctcgatcgtccgctgctggaagcggcgaaagatctcggcgccaataaactacaaacctttatccgcatcatcattccgctgaccatgccgggcattattgccggctgcctgctggtgatgcttccggcaatggggctgttctacgtgtctgacctgatgggcggcgcgaaaaacctactgattggtaacgtcattaagagccagttcctcaacatccgcgactggccgttcggtgcggcgaccagcattacgctaacgctggtgatgggcctgatgctgctgatttactggcgcgcagcgcgtttactgaataaaaaggtggagctggaatga

SEQ ID NO: 6600 - protein, 285 aa, Klebsiella oxytoca
  misc_feature (49)..(49): Xaa can be any naturally occurring amino acid
MKNTSKFQNVVIATIVGWLVLFVFLPNLMIIATSFLTRDDTNFVKLVFXLDNYARLLDPLYYDVLLHSLNMAFMATLACLALGYPFAWFLARLPEKIRPLMLFLLIVPFWTNSLIRIYGLKIFLSTKGYLNEFLLWLGVIDTPLRIMYTPSAVIIGLVYILLPFMVMPLYSSIEKLDRPLLEAAKDLGANKLQTFIRIIIPLTMPGIIAGCLLVMLPAMGLFYVSDLMGGAKNLLIGNVIKSQFLNIRDWPFGAATSITLTLVMGLMLLIYWRAARLLNKKVELE

SEQ ID NO: 6601 - DNA, 1215 bp, Klebsiella oxytoca
  misc_feature (143)..(143): n is a, c, g or t
atgaaagcgacattattatcgccatcgccagaggggccgccaacggtcatgccgcgtagtctggtgctgctgtttgctatcgccagcggcctgagcgtggcaaatgtttattacgcacaaccgctccttgatgccctggcgcncgattttgcgatcggccacgccgcgatcggtggcgcgatcgcggcaactcagcttggctgcgcgctggctttgttattgctggtaccgctgggagacaggctgaatcgccgccgcctgatggcgacgcaggtgatattactgatcgctgcgctatttgccgtcagtctggcaacatcgacagtaatgctgttagccagcatgcttgccgttggtctgctgggtaccgccatgacgcaggggttgattgcttatgccgcaagcgcggccgccccctctgaacagggcagggtagtgggcgcagcgcaaagcggggtctttattggattgctgctggcgcgggtattttcgggaagcatcagcgatctgttcggctggcgtggggtatatatctttgccgctttgctaatgttgggcatcgcgcttcccctgtggcgtcgtctgccggtactggcggttgcatcgcgcccactgagctatccccagcttctgatatccatgctggcgctgctgcgtcaggagaaaaacctgcaggtgcgaggcatgctggcattactgatgtttgccgcgttcaatatcttctggagcgcgttagttttgccgttaagcgcgccaccctttagcttttctcataccgagattggcgccctcggcctggtgggcgcgatcggcgcactggcggcaggtcgcgctggtcaatgggccgaccgcggatatgcccagcgcaccagcgccgcggccctggtgatattgctgatggcgtggtggcctttatcactgatggcatggtcgccagcggcactgctgattggcattgtcatgctggatctcggcggccaggcgctgcacgtcactaatcagagcatgattttccgtcgccgtcctgaggcgcacagcagactggtcggtttgtatatgctgttttatgccctcggcagcgcgctgggagcgataagtacgactgcggtatatgccagcgcaggatggcaaggcgtctgcctgctgggagcatcagttagcctgctggcgctgctattctggttaataacccgggggatgacgacgagcagatga

SEQ ID NO: 6602 - protein, 404 aa, Klebsiella oxytoca
  misc_feature (48)..(48): Xaa can be any naturally occurring amino acid
MKATLLSPSPEGPPTVMPRSLVLLFAIASGLSVANVYYAQPLLDALAXDFAIGHAAIGGAIAATQLGCALALLLLVPLGDRLNRRRLMATQVILLIAALFAVSLATSTVMLLASMLAVGLLGTAMTQGLIAYAASAAAPSEQGRVVGAAQSGVFIGLLLARVFSGSISDLFGWRGVYIFAALLMLGIALPLWRRLPVLAVASRPLSYPQLLISMLALLRQEKNLQVRGMLALLMFAAFNIFWSALVLPLSAPPFSFSHTEIGALGLVGAIGALAAGRAGQWADRGYAQRTSAAALVILLMAWWPLSLMAWSPAALLIGIVMLDLGGQALHVTNQSMIFRRRPEAHSRLVGLYMLFYALGSALGAISTTAVYASAGWQGVCLLGASVSLLALLFWLITRGMTTSR

SEQ ID NO: 6603 - DNA, 855 bp, Klebsiella oxytoca
  misc_feature (94)..(94): n is a, c, g or t
atggcacaaaggacaatcagttttggtgagcatccagcggtttccgtcatagggcaggggacctggtacatgggcgaaaacccggcgctgcgcnttcaggagtctgctgcactacgcgcgggcatcgatcttgggctcacggtgatcgatacggcggaaatgtatgctgacggcggcgccgaagaggttgtcggcgaagccattcgcggccagcgcgagcgcgtggtgctggtgtctaaagtgtatccgtggaacgctggcggtcgcaaaatagccagcgcctgcgaagccagcctgcgccgtctgaagaccgactatctcgatctctaccttctgcactggcgcggcgactacgcattgcaggagacggtggcaggtatggaagcgctcgttgcgcagggcaaaattcgtcgctggggcgtatcgaatcttgattacgctgatatgcaagaactctggcaggttgacggcggcgagcagtgcgcaactgaccaggtactctatcacctggcttctcgcggtattgaacatgatttgttgccatggtgccagcagcagcggctgccggtgatggcctactgtccgctggcccaggccggccgtctacgcaatggacttttaaatcataccgttgtgaaaaatattgcgcaggcccggggcgtaaccgccgcgcaggtgcttctggcatgggttatcagccatcagggggtactggcgatcccgaaagcatcgagtatcgaacatgttgagcaaaatgctgcggcgctggacatcgagctaaccgctgaagagagggcgctgctggaaaaagcttacccggcaccgggaagaaaaacaccgctggatatggtctga

SEQ ID NO: 6604 - protein, 284 aa, Klebsiella oxytoca
  misc_feature (32)..(32): Xaa can be any naturally occurring amino acid
MAQRTISFGEHPAVSVIGQGTWYMGENPALRXQESAALRAGIDLGLTVIDTAEMYADGGAEEVVGEAIRGQRERVVLVSKVYPWNAGGRKIASACEASLRRLKTDYLDLYLLHWRGDYALQETVAGMEALVAQGKIRRWGVSNLDYADMQELWQVDGGEQCATDQVLYHLASRGIEHDLLPWCQQQRLPVMAYCPLAQAGRLRNGLLNHTVVKNIAQARGVTAAQVLLAWVISHQGVLAIPKASSIEHVEQNAAALDIELTAEERALLEKAYPAPGRKTPLDMV

SEQ ID NO: 6605 - DNA, 1062 bp, Raoultella planticola
  misc_feature (122)..(122): n is a, c, g or t
ttgagtaaaaataaactctccaaaggccaacagcgccgcgtgaaggccaaccaccagcgccgcctgaaaacgacttcggagaaggccgattttgatgacaacctgttcggtgaaaaatccgnagggaccgttattagccgctttggcatgcatgccgatgtcgaatccgccgacggtagcgtccaccgttgcaatatacgccgcactatccgttcgctggtcaccggcgatcgtgtggtctggcggccaggcaaaagcgaagctgacggcgtcaacgtcaaaggcatcgtcgaggccgtgcatgaacggacctccgtactgacgcgcccggatttctatgacggcgtcaaacctatcgccgccaatatcaatcagattgtcatcgtttccgccatcttgcctgagctttctccgaatattatcgaccgctatctggtggcctgcgaaacgctgaacgtcgagccgctgatcgtgctcaataagatcgatctcctggatcaggagagcatggacttcgtcaacgagcaaatggacatttatcgccatattggttaccgcgtactgatggtctccagccgcacgcaggatggcctgaagccgcttgaagaggcgcttaccgatcgtatcagtatctttgccgggcagtctggggtaggcaaatccagcctgctgaacgcgctgctgggcctgcaggatgaccaaatccttaccaatgacgtttcggatgtctccggactggggcagcacaccactacggccgcgcgcctgtaccacttcccgcacggcggcgatgtgattgactcgccgggggtacgcgagttcggcctgtggcatctcgacgcggaacaaatcacccacggctttgtcgaattccatgattatttaggccgatgcaaataccgcgactgcaaacacgataccgatccgggctgcgccattcgcgaagcggtggagaagggcgaaatcgctgaaagccggtttgaaaactaccatcgcattctggaaagcatggcgcaggtgcaggtaaaaacgcgtaaaagcttttcatcaaccgatgactga

SEQ ID NO: 6606 - protein, 353 aa, Raoultella planticola
  misc_feature (41)..(41): Xaa can be any naturally occurring amino acid
MSKNKLSKGQQRRVKANHQRRLKTTSEKADFDDNLFGEKSXGTVISRFGMHADVESADGSVHRCNIRRTIRSLVTGDRVVWRPGKSEADGVNVKGIVEAVHERTSVLTRPDFYDGVKPIAANINQIVIVSAILPELSPNIIDRYLVACETLNVEPLIVLNKIDLLDQESMDFVNEQMDIYRHIGYRVLMVSSRTQDGLKPLEEALTDRISIFAGQSGVGKSSLLNALLGLQDDQILTNDVSDVSGLGQHTTTAARLYHFPHGGDVIDSPGVREFGLWHLDAEQITHGFVEFHDYLGRCKYRDCKHDTDPGCAIREAVEKGEIAESRFENYHRILESMAQVQVKTRKSFSSTDD

SEQ ID NO: 6607 - DNA, 978 bp, Klebsiella aerogenes
  misc_feature (929)..(929): n is a, c, g or t
atgagcgaaacggcaacctggcagccgagcgcatccattccaaacctgttaaaacgtgcagcggtgatggcggaaattcgtcgtttctttaccgaccgcggcgtgctggaggtggagacgccctgcatgagtcaggcgacggtgacggatatccatatggtcccgtttgaaacgcgtttcgtaggaccgggtcattctcaggggctgaatctgtatctgatgaccagcccggagtatcacatgaagcgcctgctggcggccggttgcggcccggtttttcagctatgccgtagcttccgcaatgaagagatggggcgccaccataatccggaattcaccatgctggagtggtatcgtccgtgctatgacatgtaccggctaatcaacgaagtagacgatctgctacagcaggtactcgactgccagccggccgaaagcctctcttatcagcaagccttcctgcgtcatctggaaatcgacccgctgtcggcagataaaacgcagctgcgcgaagtggcggctaagctcgatttgagcaatattgccgatacggaagaggatcgggacacgctgcttcagctactttttgtcatgggcgtcgagccgcatattggtaaggatcgtccgacgtttatctatcatttcccggccagccaggcgtcactggcgcaaatcagcaccgaagatcatcgcgtagcggaacgtttcgaggtctattacaaaggccttgagctggctaatggttttcatgagctcaccgacgcccgagaacagcggcagcgttttgagcaggataaccgcaagcgtgcggctcgcggactgccgcagcagccaatcgatcatcatctgctggccgctctggaagccgggctgccggattgttccggcgtagcgctgggcgttgaccgggtggtgatgctggcgctggncgcagaaagcatcggcgacgttatctcgtttaccgtcgaccgcgcctga

SEQ ID NO: 6608 - protein, 325 aa, Klebsiella aerogenes
  misc_feature (310)..(310): Xaa can be any naturally occurring amino acid
MSETATWQPSASIPNLLKRAAVMAEIRRFFTDRGVLEVETPCMSQATVTDIHMVPFETRFVGPGHSQGLNLYLMTSPEYHMKRLLAAGCGPVFQLCRSFRNEEMGRHHNPEFTMLEWYRPCYDMYRLINEVDDLLQQVLDCQPAESLSYQQAFLRHLEIDPLSADKTQLREVAAKLDLSNIADTEEDRDTLLQLLFVMGVEPHIGKDRPTFIYHFPASQASLAQISTEDHRVAERFEVYYKGLELANGFHELTDAREQRQRFEQDNRKRAARGLPQQPIDHHLLAALEAGLPDCSGVALGVDRVVMLALXAESIGDVISFTVDRA

SEQ ID NO: 6609 - DNA, 567 bp, Klebsiella oxytoca
  misc_feature (426)..(426): n is a, c, g or t
atgatattcaatgaatatatcattaacaatgaagttatttttaatgtaaatatgaatgagctgcagccggtgggggacaatggtgagagcgtgacgctgaacgcgccgactgcacgctgcctgcaacttttactggaaagcaatgggaaaattatatcccgagaagagtttctggatagtgtctggaaaaccagaggggttgtcgtttcgcagaatactttttatcaaaacatatcattgttaagaaagtcgttagtgaaagcaggattatcgcaagatattattgttacagtcaggcagcgcgggtttgttctcgcggcaggctcaaatattgcctcattcttacgctcggaagaaaaggcaccggaaaactctgaaaatgtgcaggttaccgcaagcacctcttcgcctccgattgagaaaaangtgatgaataattccgctgtccgcgaagatgcgcaaaaaatttccacagacgataaagcaacagtatttaaattacccgggtggattttgcctctgttattggtgatgaccgccgcaaacattctttctctttttttgtaa

SEQ ID NO: 6610 - protein, 188 aa, Klebsiella oxytoca
  misc_feature (142)..(142): Xaa can be any naturally occurring amino acid
MIFNEYIINNEVIFNVNMNELQPVGDNGESVTLNAPTARCLQLLLESNGKIISREEFLDSVWKTRGVVVSQNTFYQNISLLRKSLVKAGLSQDIIVTVRQRGFVLAAGSNIASFLRSEEKAPENSENVQVTASTSSPPIEKXVMNNSAVREDAQKISTDDKATVFKLPGWILPLLLVMTAANILSLFL

SEQ ID NO: 6611 - DNA, 306 bp, Klebsiella oxytoca
  misc_feature (295)..(295): n is a, c, g or t
atggctaagataacagtgacgtttacgattaccgagttttgtctccacaccggcctttccgaggaggaactgaacgaaattgtcggcctcggcatgatcgagccgcgccagccgcagcgggaaaaatggctgtttgacgatagtgcggtgacaattgttcaccgcgcagtacgcttacgcaaagagctggagctggactggccggggatcgccgtcgccttgacgctgcttgacgagaacgcgcgcctgagccgtgaaaatcaaattctgcagcagcggctggcgcgctttctgncgcatggttaa

SEQ ID NO: 6612 - protein, 101 aa, Klebsiella oxytoca
  misc_feature (99)..(99): Xaa can be any naturally occurring amino acid
MAKITVTFTITEFCLHTGLSEEELNEIVGLGMIEPRQPQREKWLFDDSAVTIVHRAVRLRKELELDWPGIAVALTLLDENARLSRENQILQQRLARFLXHG

SEQ ID NO: 6613 - DNA, 1680 bp, Klebsiella pneumoniae
  misc_feature (509)..(509): n is a, c, g or t
atgagtaatgccatcaccgagatcgacaataccgatctcgtgtttatcttcgggtataacccggcagattcacaccctattgtggcgaatcacgtgattaacgccaaacgcaacggggcaaaaatcatcgtctgcgatccgcgtaaaattgaaaccgcgcgcattgccgatatgcacattgcgctgaagaacggctcgaatatcgcgctgctcaacgctatcgggcacgtgattatcgaagaagacctctacgataaatccttcgtcgccagccgttctgagggcttcgaagagtatcgcaaaatcgtcgaaggctacacgccagagtcggtggaagagatcaccggcgtgagcgcccaggagatccgcgcctgcgcccgtatgtatgccagcgcgaaatccgccgcgatcctgtggggcatgggcgtgacccagttctaccagggcgtggaaaccgtacgttcgctgaccagcctggcgatcctcaccggcaacctcggcaagccgancgtcggcgtcaacccggtgcgcggccagaacaacgttcagggcgcctgcgacatgggcgcgctgccggatacctatccgggctatcaatacgttaagttcccggagaaccgcgagaagttcgccaaagcctggggcgtcgatagcctgccggcgcacaccggctaccgcatcagcgagctgccgcaccgcgcggcgcatggcgaagtgcgggcggcgtatattatgggggaagatccgctccagaccgacgccgagctgtccgcagtgcgtaaggcattcgacgatctggaactggttatcgtccaggatattttcatgaccaaaaccgcctcagcggccgacgttatcctgccgtccacctcgtggggcgagcacgaaggcgtctataccgcagcggaccgcggcttccagcgcttctttaaagcggtagagccgaaatgggacctgaaaaccgactggcagattatcagcgaaatcgctacccggatgggctacaagatgcactacaacaacacccaggagatctgggacgagttgcggcatctgtgtccggatttctacggcgccacctacgagaaaatgggcgagctaggctacgtcatgtggccgtgccgcgatgagtccgacgccgatcaggggacctcttatttgtttaaagagaagttcgataccccgaacggtctggcgcagttcttcacctgcgactgggtcgcgccgattgacaaactcaccgaagagtacccgatggtgctgtcgacggtgcgcgaagtcggccactactcgtgccgttcgatgaccggtaactgtgcggcgctggccgcgctggcggatgaacctggctatgcgcaaatcaacaccgccgatgccgaacgtttgggcattgaggatgaggcgctggtgtgggtgaactcgcgtaagggccgtattatcacccgcgcgcaggtcagcgatcgtccgaataaaggggcggtctatatgacctaccagtggtggattggcgcctgtaacgagctggtttccgagaacctgagcccgataaccaaaacgccggagtacaagtactgcgccgtcaacgttgagccgattgccgaccagcgtgccgctgagcagtacgtcattgatgagtacaacaagctgaaagcccgcctgcgcgaaagcgcgctgggttaa

SEQ ID NO: 6614 - protein, 559 aa, Klebsiella pneumoniae
  misc_feature (170)..(170): Xaa can be any naturally occurring amino acid
MSNAITEIDNTDLVFIFGYNPADSHPIVANHVINAKRNGAKIIVCDPRKIETARIADMHIALKNGSNIALLNAIGHVIIEEDLYDKSFVASRSEGFEEYRKIVEGYTPESVEEITGVSAQEIRACARMYASAKSAAILWGMGVTQFYQGVETVRSLTSLAILTGNLGKPXVGVNPVRGQNNVQGACDMGALPDTYPGYQYVKFPENREKFAKAWGVDSLPAHTGYRISELPHRAAHGEVRAAYIMGEDPLQTDAELSAVRKAFDDLELVIVQDIFMTKTASAADVILPSTSWGEHEGVYTAADRGFQRFFKAVEPKWDLKTDWQIISEIATRMGYKMHYNNTQEIWDELRHLCPDFYGATYEKMGELGYVMWPCRDESDADQGTSYLFKEKFDTPNGLAQFFTCDWVAPIDKLTEEYPMVLSTVREVGHYSCRSMTGNCAALAALADEPGYAQINTADAERLGIEDEALVWVNSRKGRIITRAQVSDRPNKGAVYMTYQWWIGACNELVSENLSPITKTPEYKYCAVNVEPIADQRAAEQYVIDEYNKLKARLRESALG

SEQ ID NO: 6615 - DNA, 1317 bp, Klebsiella oxytoca
  misc_feature (1163)..(1163): n is a, c, g or t
atgttttttaacgccgccgacaaagccctgtggcgcttagcgctgcccatgatcttctccaatatcaccgttccgctgctcgggctggtggacaccgccgttattggtcatctcgatagcccggtttatctggggggcgtggcggttggcgcaacggcaaccagtttcctctttatgctgctgttgttcctgcgaatgagtaccactgggctgacggcccaggcgtacggcgctaaagatccgcagcgtctggcgcgtgcgctggtgcagccgctgtgcctggcgctggccgccggggcggccattgtgctcttgcggatgccgttgatcgacctggcgctgcacatcgtcggcggcagcgaagccgtgctcgaacaggccagacgcttccttgagatccgctggctaagcgcgccggcatcgctggcgaacctggtcctgctgggctggctgctgggcgtgcagtacgccagagcgccggtgatcctgctggtggtcggcaatgttcttaacattatgctcgatgtatggctggtgatgggtctgcatatgaacgtgcagggggcggcgctggcaacggtcacggcagaatacgccactttctttatcggcctgctgatggcaaggcgcgtgctggcgctgcgcggcgtttccctgttaatgctaaaaaacgcctggcgcggcgatatacgtcgcctgctggcgctgaatcgcgacatcatgctgcgttcgctgctgctacagctttgcttcggtgcggtaacggtatttggcgctcgcctcggcgccgatgtcgtcgcggtcaatgcggttctcatgacgatgctgacctttaccgcctacgcgctggacggttttgcctacgccgttgaggcgcactccgggcaggcctacggcgcgcgcgacgatagccggctgctggctgtctggcatgcggcttgccgccagtcagggatagtggcgctggcgtttgcgctgatttacggacttgccggcgaacagattattgcgttgttgacctcgctgccttccctgcagcagctggccgaccgctatctggtctggcagatgattctgccggtcattggcgtctggtgctacctgctggacggcatgtttatcggtgcgacgcgcggtgcggagatgcgtaacagcatggcggnggcggcggcggggtttgccctgacgctattgacggtacccacgctcggtaaccatggactgtggctggcgctgacggtatttctcgctctgcgcggcgtttccctggcagcgatctggcggcggcactggcggcgcggaacctggttttcgtaa

SEQ ID NO: 6616 - protein, 438 aa, Klebsiella oxytoca
  misc_feature (388)..(388): Xaa can be any naturally occurring amino acid
MFFNAADKALWRLALPMIFSNITVPLLGLVDTAVIGHLDSPVYLGGVAVGATATSFLFMLLLFLRMSTTGLTAQAYGAKDPQRLARALVQPLCLALAAGAAIVLLRMPLIDLALHIVGGSEAVLEQARRFLEIRWLSAPASLANLVLLGWLLGVQYARAPVILLVVGNVLNIMLDVWLVMGLHMNVQGAALATVTAEYATFFIGLLMARRVLALRGVSLLMLKNAWRGDIRRLLALNRDIMLRSLLLQLCFGAVTVFGARLGADVVAVNAVLMTMLTFTAYALDGFAYAVEAHSGQAYGARDDSRLLAVWHAACRQSGIVALAFALIYGLAGEQIIALLTSLPSLQQLADRYLVWQMILPVIGVWCYLLDGMFIGATRGAEMRNSMAXAAAGFALTLLTVPTLGNHGLWLALTVFLALRGVSLAAIWRRHWRRGTWFS

SEQ ID NO: 6617 - DNA, 1128 bp, Klebsiella oxytoca
  misc_feature (794)..(794): n is a, c, g or t
atggctaaaaaaatcactatacggaaaggccaactggggcttctctctcgtcagggagattactatcagattctggaagcgggcgagtatcgcctgccgtggttcaacgttcctgaagtgctaatcgttaacagggacggcagcgaagtgccggaggcgctggccgagtatttacggcgctttcaggcggaatggatcgaacagtactgcctggcggcggacctgacggataacgaggccggagcgctctataacaacggcgtgctgcaggaaattctgccgccagcgacgcgtcgactttactgggccgccggtgacgagatgcagctgctacgtctggatacccggcaggttgaggtccccgaggcgatcatgaacgcggtgctgcagccgagacgtcacgggacggtaaaaggtcgcgaagcgatcctgaccgtatcggtgccagcctggcacgtcggggtattgaaagtcgatggtgagacgcagtcgctgctgccgccgggcctgagcgcctactggaagatcaatcacctggtggaagctgaagtggtcgatacccgcctgcaggtgctggaagtcggcggtcaggagattctgaccaaagataaagtgaatctgcgtttaaatctggcggcgaactggcgctacagcgatgtgttgcgggcttttgggcagctgacgaagcccctggaccatctgtatcgcgaactgcagtttgcgctgcgtgaagccgtcggaacgcgaacgctggatgaactactggaagataagcacatcattgatgaggtggngagcgcgcaggtaaccgagcgcatggcggcatttggtatcgaagtcgcctcgctgggcgtgaaagatattgttttgcccggcgacatgaaagctattctgtcgcagctggtggaggcggagaaatcggcgcaggcgaacgtgatccgccggcgtgaagagaccgcggcgacgcgttcgctgctcaacaccgcgaaagtgatggaaaacaacccggtcgcgctgcgcttaaaagagctggaaacgctggaaagggtggcggagcgtatcgataaaatctcggtctttggcggcctggaccaggtgctgcatggactggtcaatctaaaaggataa

SEQ ID NO: 6618 - protein, 375 aa, Klebsiella oxytoca
  misc_feature (265)..(265): Xaa can be any naturally occurring amino acid
MAKKITIRKGQLGLLSRQGDYYQILEAGEYRLPWFNVPEVLIVNRDGSEVPEALAEYLRRFQAEWIEQYCLAADLTDNEAGALYNNGVLQEILPPATRRLYWAAGDEMQLLRLDTRQVEVPEAIMNAVLQPRRHGTVKGREAILTVSVPAWHVGVLKVDGETQSLLPPGLSAYWKINHLVEAEVVDTRLQVLEVGGQEILTKDKVNLRLNLAANWRYSDVLRAFGQLTKPLDHLYRELQFALREAVGTRTLDELLEDKHIIDEVXSAQVTERMAAFGIEVASLGVKDIVLPGDMKAILSQLVEAEKSAQANVIRRREETAATRSLLNTAKVMENNPVALRLKELETLERVAERIDKISVFGGLDQVLHGLVNLKG

SEQ ID NO: 6619 - DNA, 2634 bp, Citrobacter freundii
  misc_feature (260)..(260): n is a, c, g or t
atgagcgaccttgcgagagaaattacaccggtcaacattgaggaagagctgaagagctcctatctggattatgcgatgtcggtcattgttggccgtgcgctgccggatgtccgagatggcctgaagccggtacaccgtcgcgtactatacgccatgaacgtattgggcaatgactggaacaaagcctataaaaaatctgcccgtgtcgtgggtgacgtcatcggtaaataccaccctcatggtgatattgccgtatacgncaccattgtacgtatggcgcagccattctccctgcgttacatgctggtagatggccagggtaactttggttcggtcgacggcgactccgccgcagcgatgcgttatacggaaatccgtatgtcgaagatcgcccatgaactgatggccgacctcgaaaaagagacggtggatttcgtcgataactatgacggcacggagaaaatccctgacgttatgccgaccaaaatcccgaacctgctagtcaacggttcgtccggtatcgcggtaggtatggcgactaatattccgccgcacaacctgaccgaagtgatcaacggctgtctggcctatgttgaaaacgaagacatcagcattgaagggctgatggaacatattcccggcccggacttcccgaccgctgcgatcatcaacggtcgccgcggcattgaagaggcctatcgtacgggtcgcggaaaagtgtacattcgcgctcgcgcggaagtggaagctgacgcgaagaccggccgcgaaaccatcatcgtgcatgaaattccgtatcaggtgaacaaagcgcgcctgattgagaaaatcgccgagctggtcaaagacaaacgcgttgaaggcatcagcgcgctgcgcgacgagtctgataaagatggcatgcgcatcgtgattgaagtgaagcgcgatgcggtgggtgaggtggtgcttaacaacctctattcgcagactcagctccaggtctccttcggtatcaacatggttgccctgcaccatggtcagccgaagatcatgaacctgaaagaaattattgccgcgttcgtgcgccaccgccgcgaagtggtgacccgtcgtactatttttgaactgcgtaaagcccgcgatcgcgcgcatatcctcgaagcgctggcgattgccctggccaacatcgatccgattatcgaactgattcgccgcgcgccgactccggcggaagcgaaagcagcattaatcgcgcgttcatgggatctgggcaacgtttccgctatgctggaacgcgcaggcgatgacgccgctcgtccagaatggctggagcctgagttcggcgtacgcgacggtcagtactacctgaccgaacagcaggcgcaggcgattctggatctgcgtttgcagaaactgaccggtcttgagcatgaaaaactgctcgatgaatacaaagagctgctggaacagattgcggaactgctgcacattctgggcagcgccgatcgcctgatggaagttatccgtgaagagctggagctggtccgtgaacagttcggcgacgcgcgtcgtaccgagatcaccgctaacagcgcggatatcaacatcgaagacctgatcaaccaggaagatgttgtcgtgaccctttcgcatcagggctacgtgaagtaccagccgttaaccgattacgaagcacagcgtcgtggcggtaaaggtaaatctgcggcgcgtataaaagaagaagactttatcgaccgcctgctggtggccaacacccacgacacgatcctctgcttctccagccgcgggcgtctctactggatgaaggtttatcagctgccggaagccagccgcggcgcgcgcgggcgtccgatcgtcaacctgctgccgctcgaagccaacgaacgtatcaccgcgattctgccggtacgtgagtacgaagagggcgtgaacgtctttatggctaccgccagcggtaccgtgaagaaaacggcgctgaccgaattcagccgtccgcgttctgccggtattatcgcggttaacctcaacgaaggtgatgagctgattggcgtcgatctgacctccggtcaggacgaagttatgctgttctccgccgccggtaaagtggtgcgctttaaagaggacgccgtccgcgcaatgggccgtaccgctaccggcgtacgcggcatcaagctggccggcgaagataaagtggtttcgttgatcattccgcgcggtgaaggggccatcctgaccgttacgcagaatggctacggtaaacgtaccgcggctgaagagtatccaaccaagtcgcgtgcgacccagggcgtaatctcaatcaaagtgaccgaacgcaacggttccgtggtgggcgcggtgcaggttgatgactgcgaccagattatgatgatcaccgatgcgggcacgctggtacgaacccgcgtttccgaggtgagcattgtcggccgtaacactcagggcgtgatcctgattcgtaccgcggaagatgaaaatgtggtcggtctgcagcgcgttgctgagccggttgatgacgaagagctggatgccatcgacggcagcgcggcggaaggcgatgaagatatcgcgccggaagcggacactgacgatgacatcgccgaagatgaagagtaa

SEQ ID NO: 6620 - protein, 877 aa, Citrobacter freundii
  misc_feature (87)..(87): Xaa can be any naturally occurring amino acid
MSDLAREITPVNIEEELKSSYLDYAMSVIVGRALPDVRDGLKPVHRRVLYAMNVLGNDWNKAYKKSARVVGDVIGKYHPHGDIAVYXTIVRMAQPFSLRYMLVDGQGNFGSVDGDSAAAMRYTEIRMSKIAHELMADLEKETVDFVDNYDGTEKIPDVMPTKIPNLLVNGSSGIAVGMATNIPPHNLTEVINGCLAYVENEDISIEGLMEHIPGPDFPTAAIINGRRGIEEAYRTGRGKVYIRARAEVEADAKTGRETIIVHEIPYQVNKARLIEKIAELVKDKRVEGISALRDESDKDGMRIVIEVKRDAVGEVVLNNLYSQTQLQVSFGINMVALHHGQPKIMNLKEIIAAFVRHRREVVTRRTIFELRKARDRAHILEALAIALANIDPIIELIRRAPTPAEAKAALIARSWDLGNVSAMLERAGDDAARPEWLEPEFGVRDGQYYLTEQQAQAILDLRLQKLTGLEHEKLLDEYKELLEQIAELLHILGSADRLMEVIREELELVREQFGDARRTEITANSADINIEDLINQEDVVVTLSHQGYVKYQPLTDYEAQRRGGKGKSAARIKEEDFIDRLLVANTHDTILCFSSRGRLYWMKVYQLPEASRGARGRPIVNLLPLEANERITAILPVREYEEGVNVFMATASGTVKKTALTEFSRPRSAGIIAVNLNEGDELIGVDLTSGQDEVMLFSAAGKVVRFKEDAVRAMGRTATGVRGIKLAGEDKVVSLIIPRGEGAILTVTQNGYGKRTAAEEYPTKSRATQGVISIKVTERNGSVVGAVQVDDCDQIMMITDAGTLVRTRVSEVSIVGRNTQGVILIRTAEDENVVGLQRVAEPVDDEELDAIDGSAAEGDEDIAPEADTDDDIAEDEE

SEQ ID NO: 6621 - DNA, 2634 bp, Klebsiella pneumoniae
  misc_feature (248)..(248): n is a, c, g or t
atgagcgaccttgcgagagaaattacaccggtcaacattgaggaagagctgaagagctcctatctggattatgcgatgtcggtcattgttggccgtgcgctgccggatgtccgagatggcctgaagccggtacaccgtcgcgtactatacgccatgaacgtattgggcaatgactggaacaaagcctataaaaaatctgcccgtgtcgtgggtgacgtcatcggtaaataccaccctcatggtgatantgccgtatacggcaccattgtacgtatggcgcagccattctccctgcgttacatgctggtagatggccagggtaactttggttcggtcgacggcgactccgccgcagcgatgcgttatacggaaatccgtatgtcgaagatcgcccatgaactgatggccgacctcgaaaaagagacggtggatttcgtcgataactatgacggcacggagaaaatccctgacgttatgccgaccaaaatcccgaacctgctagtcaacggttcgtccggtatcgcggtaggtatggcgactaatattccgccgcacaacctgaccgaagtgatcaacggctgtctggcctatgttgaaaacgaagacatcagcattgaagggctgatggaacatattcccggcccggacttcccgaccgctgcgatcatcaacggtcgccgcggcattgaagaggcctatcgtacgggtcgcggaaaagtgtacattcgcgctcgcgcggaagtggaagctgacgcgaagaccggccgcgaaaccatcatcgtgcatgaaattccgtatcaggtgaacaaagcgcgcctgattgagaaaatcgccgagctggtcaaagacaaacgcgttgaaggcatcagcgcgctgcgcgacgagtctgataaagatggcatgcgcatcgtgattgaagtgaagcgcgatgcggtgggtgaggtggtgcttaacaacctctattcgcagactcagctccaggtctccttcggtatcaacatggttgccctgcaccatggtcagccgaagatcatgaacctgaaagaaattattgccgcgttcgtgcgccaccgccgcgaagtggtgacccgtcgtactatttttgaactgcgtaaagcccgcgatcgcgcgcatatcctcgaagcgctggcgattgccctggccaacatcgatccgattatcgaactgattcgccgcgcgccgactccggcggaagcgaaagcagcattaatcgcgcgttcatgggatctgggcaacgtttccgctatgctggaacgcgcaggcgatgacgccgctcgtccagaatggctggagcctgagttcggcgtacgcgacggtcagtactacctgaccgaacagcaggcgcaggcgattctggatctgcgtttgcagaaactgaccggtcttgagcatgaaaaactgctcgatgaatacaaagagctgctggaacagattgcggaactgctgcacattctgggcagcgccgatcgcctgatggaagttatccgtgaagagctggagctggtccgtgaacagttcggcgacgcgcgtcgtaccgagatcaccgctaacagcgcggatatcaacatcgaagacctgatcaaccaggaagatgttgtcgtgaccctttcgcatcagggctacgtgaagtaccagccgttaaccgattacgaagcacagcgtcgtggcggtaaaggtaaatctgcggcgcgtataaaagaagaagactttatcgaccgcctgctggtggccaacacccacgacacgatcctctgcttctccagccgcgggcgtctctactggatgaaggtttatcagctgccggaagccagccgcggcgcgcgcgggcgtccgatcgtcaacctgctgccgctcgaagccaacgaacgtatcaccgcgattctgccggtacgtgagtacgaagagggcgtgaacgtctttatggctaccgccagcggtaccgtgaagaaaacggcgctgaccgaattcagccgtccgcgttctgccggtattatcgcggttaacctcaacgaaggtgatgagctgattggcgtcgatctgacctccggtcaggacgaagttatgctgttctccgccgccggtaaagtggtgcgctttaaagaggacgccgtccgcgcaatgggccgtaccgctaccggcgtacgcggcatcaagctggccggcgaagataaagtggtttcgttgatcattccgcgcggtgaaggggccatcctgaccgttacgcagaatggctacggtaaacgtaccgcggctgaagagtatccaaccaagtcgcgtgcgacccagggcgtaatctcaatcaaagtgaccgaacgcaacggttccgtggtgggcgcggtgcaggttgatgactgcgaccagattatgatgatcaccgatgcgggcacgctggtacgaacccgcgtttccgaggtgagcattgtcggccgtaacactcagggcgtgatcctgattcgtaccgcggaagatgaaaatgtggtcggtctgcagcgcgttgctgagccggttgatgacgaagagctggatgccatcgacggcagcgcggcggaaggcgatgaagatatcgcgccggaagcggacactgacgatgacatcgccgaagatgaagagtaa

SEQ ID NO: 6622 - protein, 877 aa, Klebsiella pneumoniae
  misc_feature (83)..(83): Xaa can be any naturally occurring amino acid
MSDLAREITPVNIEEELKSSYLDYAMSVIVGRALPDVRDGLKPVHRRVLYAMNVLGNDWNKAYKKSARVVGDVIGKYHPHGDXAVYGTIVRMAQPFSLRYMLVDGQGNFGSVDGDSAAAMRYTEIRMSKIAHELMADLEKETVDFVDNYDGTEKIPDVMPTKIPNLLVNGSSGIAVGMATNIPPHNLTEVINGCLAYVENEDISIEGLMEHIPGPDFPTAAIINGRRGIEEAYRTGRGKVYIRARAEVEADAKTGRETIIVHEIPYQVNKARLIEKIAELVKDKRVEGISALRDESDKDGMRIVIEVKRDAVGEVVLNNLYSQTQLQVSFGINMVALHHGQPKIMNLKEIIAAFVRHRREVVTRRTIFELRKARDRAHILEALAIALANIDPIIELIRRAPTPAEAKAALIARSWDLGNVSAMLERAGDDAARPEWLEPEFGVRDGQYYLTEQQAQAILDLRLQKLTGLEHEKLLDEYKELLEQIAELLHILGSADRLMEVIREELELVREQFGDARRTEITANSADINIEDLINQEDVVVTLSHQGYVKYQPLTDYEAQRRGGKGKSAARIKEEDFIDRLLVANTHDTILCFSSRGRLYWMKVYQLPEASRGARGRPIVNLLPLEANERITAILPVREYEEGVNVFMATASGTVKKTALTEFSRPRSAGIIAVNLNEGDELIGVDLTSGQDEVMLFSAAGKVVRFKEDAVRAMGRTATGVRGIKLAGEDKVVSLIIPRGEGAILTVTQNGYGKRTAAEEYPTKSRATQGVISIKVTERNGSVVGAVQVDDCDQIMMITDAGTLVRTRVSEVSIVGRNTQGVILIRTAEDENVVGLQRVAEPVDDEELDAIDGSAAEGDEDIAPEADTDDDIAEDEE

SEQ ID NO: 6623 - DNA, 684 bp, Klebsiella oxytoca
  misc_feature (617)..(617): n is a, c, g or t
gtggcaagtaagtttcagaaccgtttagtcgggacgattgtgctggtagcgctgggggtgattatcctgccaggactactggatggtcagaaaaaacattatcaggatgagtttgccgccattccgctggtgcccaaaccaggggaccgcgatgagccggatatgctgccagcggcgactcaggcgctgccttcgcagcctccggaaggggcggcggaagaggtgagagccggtgacgccgcggcgccatcgttggatccgtcgcgcataccggtgaacaacaacagttttgatgtggttcaggagccggttgtcgcgccaaaaccgcaggcgcagccgaaacctcagccgaagccggtagagaaaccacagcagcagcaggttgcggcgcagacgccgccgcctaagccacagcagcaggctgaaatcccggcgccgaccggtaaagcatacgtagtgcagctgggggcgctaaagaacgccgataaggtcaacgaaattgtgggcaagctgcgcgcttccggttttaaggtttacacatcgccttcgacaccggtgcagggtaaaattacccgtattcttgtggggccggatacctcaaaggataagcttaaagnccagcttggagaactgaagcagctttcaggactcagcggcgtggtcatgggctacagcccgaactaa

SEQ ID NO: 6624 - protein, 227 aa, Klebsiella oxytoca
  misc_feature (206)..(206): Xaa can be any naturally occurring amino acid
MASKFQNRLVGTIVLVALGVIILPGLLDGQKKHYQDEFAAIPLVPKPGDRDEPDMLPAATQALPSQPPEGAAEEVRAGDAAAPSLDPSRIPVNNNSFDVVQEPVVAPKPQAQPKPQPKPVEKPQQQQVAAQTPPPKPQQQAEIPAPTGKAYVVQLGALKNADKVNEIVGKLRASGFKVYTSPSTPVQGKITRILVGPDTSKDKLKXQLGELKQLSGLSGVVMGYSPN

SEQ ID NO: 6625 - DNA, 1047 bp, Klebsiella oxytoca
  misc_feature (757)..(757): n is a, c, g or t
atgagtcagaaaaattttgttgagctgcgcaacgtcaccaagcgattcggcagcaacacggttatcgacaatatcaatctcaccatccctcagggacaaatggtgaccctgctcggcccttccggctgcggcaagaccaccattctgcgcctggtcgccgggctggaaaaaccgagcgaaggacagattttcatcgatggcgaagacgttactcatcgctccattcagcagcgcgacatctgtatggtatttcagtcttacgccctgtttccgcatatgtcgctgggggacaacgtcggctacggtctgaagatgctcggcgtgtcgcgcagcgacgtgaaagcgcgggtgaaggaggcgctggcgatggtggatctggaaggattcgaagatcgctatgtcgatcagatctccggcggtcagcagcagcgcgtggcgctggcgcgcgccctgatcctcaagccaaaggtgctgctgtttgatgagcccttaagcaacctagatgccaacctgcggcgcagcatgcgcgataagatccgcgagttacagaagcagtttgatatcacctcgctgtacgtgacccatgatcagagcgaagcctttgcggtttccgataccgtgctggtgatgaataagggacatatcatgcagatcggctcgccgcaggatctttaccgccagcccgcatcgcgctttatggcgagctttatgggcgatgccaacctgttcccggccgcctttagcgaggattttgtcnatatttatggctatcggctgccgaggccgccgcattttgccgcccagggcgagggcagcgtcggcgtgcgcccggaggcaatcaccctgagcgatcgcggcgaggagagccagcgctgcacgattcgctacgtggcctatatgggaccgcagtacgaggtgacggtagagtggcacgggcaggaaattttgctgcaggtgaacgcgacgcggctgcagccggatgtcggcgagcactattatctcgaaatccacccgtacgggatgtttgtgttagcggatgccgggtga

SEQ ID NO: 6626 - protein, 348 aa, Klebsiella oxytoca
  misc_feature (253)..(253): Xaa can be any naturally occurring amino acid
MSQKNFVELRNVTKRFGSNTVIDNINLTIPQGQMVTLLGPSGCGKTTILRLVAGLEKPSEGQIFIDGEDVTHRSIQQRDICMVFQSYALFPHMSLGDNVGYGLKMLGVSRSDVKARVKEALAMVDLEGFEDRYVDQISGGQQQRVALARALILKPKVLLFDEPLSNLDANLRRSMRDKIRELQKQFDITSLYVTHDQSEAFAVSDTVLVMNKGHIMQIGSPQDLYRQPASRFMASFMGDANLFPAAFSEDFVXIYGYRLPRPPHFAAQGEGSVGVRPEAITLSDRGEESQRCTIRYVAYMGPQYEVTVEWHGQEILLQVNATRLQPDVGEHYYLEIHPYGMFVLADAG

SEQ ID NO: 6627 - DNA, 579 bp, Citrobacter amalonaticus
  misc_feature (5)..(5): n is a, c, g or t
atggntcgtcgccaatttaccagccagtccctggtgctgattgcgatcgccgtcgccatcaacatgatcggcggacagctcatcagtatgttaaaacttcccatttttctcgattcaatcggcaccttaatcagcgcggttctactcggaccggtcattggcatgttgaccggtttactgaccaatcttctgtggggtctgctgaccgatccgattgccgccgcctttgcgccagtggctatggtgattggcctggttgccggatggctggcgagagcgggatggttccgcactttacctaaggtgatcattagcggggttgtcattaccctcgccgtgaccgcggttgccgtgccgctgcggacggcgctgtttggcggcgtgacgggaagcggtgcggatctgttcgtcgcctggatgcattcggtaggtcagaatctgctggagtcggtggcgattaccgtcttaggcgccaatctggtggataaaattcttaccgcgattatcgtctggaccctgttgcgccagctgccgctgcgtacgttgcgccattttcctgctatgtccgccgtacgctaa

SEQ ID NO: 6628 - protein, 192 aa, Citrobacter amalonaticus
  misc_feature (2)..(2): Xaa can be any naturally occurring amino acid
MXRRQFTSQSLVLIAIAVAINMIGGQLISMLKLPIFLDSIGTLISAVLLGPVIGMLTGLLTNLLWGLLTDPIAAAFAPVAMVIGLVAGWLARAGWFRTLPKVIISGVVITLAVTAVAVPLRTALFGGVTGSGADLFVAWMHSVGQNLLESVAITVLGANLVDKILTAIIVWTLLRQLPLRTLRHFPAMSAVR

SEQ ID NO: 6629 - DNA, 879 bp, Enterobacter cloacae
  misc_feature (784)..(784): n is a, c, g or t
atgcgcatcgaagtcttactggatttaaaaactcgactcggcgaaagcccggtctgggatgtcgaacagcagcgtctttggtgggtggacagcctcgacgggcgcctgttcgcctgtaacgcgcagggcggcgcgattaagagctgggacgtgcggcagaaaattggctcgttcgccctgcgccagaacggcgaaggcgcggtggtggcgctacagaatggcgtacatctgctcgacttcgccagcggcgagctgacgctgctgcaccatccggaagcggaccggccctttaaccggctcaacgacggcaaagtcgatcgtcagggacgttttctgttcggatcgatggatatgcgtgaagaggagccgagcggcgcgctatatcgcctggacgccgatctgtcactacacgtgctgaagaaaaatatcatcgtctctaacgccccctgctggagcccctccggcgagacgttctattttgccgatacctggacgggcgaaatctgcgcctgggactacaacaccgcgaccggcgatctctccggagaacgagtcttttgccgtgtcgatagcagcgaaggcggcgcggcggatggcgccaccgtggacagcgaaggctatctgtggaacgcgctggtctacgcgggcaagctggtgcgctacacgccggagggcaaggtcgatcgcatcattgagatgccggtgaaaaaagtgaccagcgttatgttcggcggcgaaaacctcgacgtgctctacgtcacctcaatggcgcagccgcccctcncgcgcttcccggaagataatcagctgcgcggcagcctgttcgccctgtacgacctgggcgtgaccggcgtagcggaacggcgttttgccggctaa

SEQ ID NO: 6630 - protein, 292 aa, Enterobacter cloacae
  misc_feature (262)..(262): Xaa can be any naturally occurring amino acid
MRIEVLLDLKTRLGESPVWDVEQQRLWWVDSLDGRLFACNAQGGAIKSWDVRQKIGSFALRQNGEGAVVALQNGVHLLDFASGELTLLHHPEADRPFNRLNDGKVDRQGRFLFGSMDMREEEPSGALYRLDADLSLHVLKKNIIVSNAPCWSPSGETFYFADTWTGEICAWDYNTATGDLSGERVFCRVDSSEGGAADGATVDSEGYLWNALVYAGKLVRYTPEGKVDRIIEMPVKKVTSVMFGGENLDVLYVTSMAQPPLXRFPEDNQLRGSLFALYDLGVTGVAERRFAG

SEQ ID NO: 6631 - DNA, 816 bp, Escherichia coli
  misc_feature (185)..(185): n is a, c, g or t
atgcttgccacgaccgatctctggtttcgctatcaggacgagccggtgctgaaggggctgacgctggatttttcccatcacgccgtgaccggactggtaggggcgaacggctgcggaaaatccacgctgtttatgaacctgagcggtctgctgcgcccgcagagcggggcggtgctatggcaagnaaaaccgctggactacagcaagcgcggcctgctggcgctgcgtcagcaggtggcgaccgttttccaggacccggaccagcagattttctataccgatatcgacagcgatatcgcctttagcctgcggaacctgggcgtagcggaagaggaaattgcccgccgggtggacgatgccctgactctcgtcgatgcccaggggtttcgtcaccagccgattcagtgcctgagccacgggcagaaaaagcgcgtggcgatagccggcgcgctggtgctgcaggcgcgctatttactgctcgacgagccgacggcgggtctcgatccttcgggacgcgcgcagatgatcgacatcattaagcgtattgccgatcggggcaaccacgtggcgatctccagccacgatatcgatctgatctatgaaatcagcgatgcggtttacgtgttacgccgcggcgaagtgctggcgcacggcgaccccggggaggtgtttgcccgcagcgaactgatggcccaggccgggctcacccagccgtggctggtgaaactgcacgcgcagctcgggctgccgctgtgtaaaaccgaagaagaattttttacgcggatgcgaagcaacgcgatgaaggaggcgtcatga

SEQ ID NO: 6632 - protein, 271 aa, Escherichia coli
  misc_feature (62)..(62): Xaa can be any naturally occurring amino acid
MLATTDLWFRYQDEPVLKGLTLDFSHHAVTGLVGANGCGKSTLFMNLSGLLRPQSGAVLWQXKPLDYSKRGLLALRQQVATVFQDPDQQIFYTDIDSDIAFSLRNLGVAEEEIARRVDDALTLVDAQGFRHQPIQCLSHGQKKRVAIAGALVLQARYLLLDEPTAGLDPSGRAQMIDIIKRIADRGNHVAISSHDIDLIYEISDAVYVLRRGEVLAHGDPGEVFARSELMAQAGLTQPWLVKLHAQLGLPLCKTEEEFFTRMRSNAMKEAS

SEQ ID NO: 6633 - DNA, 738 bp, Klebsiella oxytoca
  misc_feature (133)..(133): n is a, c, g or t
atgaaacttgaacaacagctaaaacagctgtctttcagcgggttagctgcggcgctattgctgatagtggttcccgaaaaggctttcgcgatgcacatcatggaggggtttttaccgccgatgtgggccctgncatggtggctgctgtttttaccctgcctgtggtacgggctggtgcgcctgcgccgcattgtgcaggaagataacaatcagaaggtgctgctggcgctgtgcggggcgtttatttttgtcctctcggcgctgaaaattccttccgtaaccggcagctgttcccacccgaccggcgtcggcctggcggtgattctcttcgggcctggcgtggtggcgatccttggcgccatcgtactgctgttccaggcgctgctgctggcgcacggcgggctgacgacgctcggcgcgaacgggatgtcgatggcggtcatcgggccggtggtcggctatatggtgtggaaaatggcctgccgcgcgggcattcgccgcgacgtcggggtgtttctctgcgcgatgctggcggatctggtgacctactttgtcacctccgtacagctcggcgtggcctttccggatcccgccgccggcgcgaccggatcgatcgtcaagtttatggggatcttctgcctgacgcagatcccgatcgccattgctgaagggctgttaaccgtcatgatctacgaccagttgaccaaacgtcagctgattaccgcacaggggcattaa

SEQ ID NO: 6634 - protein, 245 aa, Klebsiella oxytoca
  misc_feature (45)..(45): Xaa can be any naturally occurring amino acid
MKLEQQLKQLSFSGLAAALLLIVVPEKAFAMHIMEGFLPPMWALXWWLLFLPCLWYGLVRLRRIVQEDNNQKVLLALCGAFIFVLSALKIPSVTGSCSHPTGVGLAVILFGPGVVAILGAIVLLFQALLLAHGGLTTLGANGMSMAVIGPVVGYMVWKMACRAGIRRDVGVFLCAMLADLVTYFVTSVQLGVAFPDPAAGATGSIVKFMGIFCLTQIPIAIAEGLLTVMIYDQLTKRQLITAQGH

SEQ ID NO: 6635 - DNA, 1380 bp, Klebsiella oxytoca
  misc_feature (1014)..(1014): n is a, c, g or t
atggcagccaggcagcacgcattcattcttgcaggtaccggcagcggttgtggtaaaactacggtcacgcttggcctgctcagcctgttgaagcagcgcggcatgcgggttcagccctgcaaagtcggcccggactacctcgacaccggctggcacaccgccgtcagcggcgtcgcttcccgcaacctcgacagctttatgctcccggagccggtgcttaacgcgctattttgcgaacagatgcagcgggcggatatcgcggtcattgagggcgtgatggggctgtatgacggcttcggtaccgaccctggctactgcagcaccgccgcgatggctaaacagctcggctgtccggtcattttgctggtagatggcaaagcggtttccacctccatcgccgccacggtgatgggatttcaacacttcgaccccagtcttaacattgccggcgttatcgtcaatcgcgtcaacagcgaaagccattatcagcttctcaaaggcgccattgaacgctactgcgagctgccggtgctcggctacgtaccgcgagtggaaggggtggcgttacccgaacgccatctgggactggttaccgcccgcgagtcgctggttaaccagcagccgtggcgcgattttgcccaaacgctggcgcaaacgctggatattgaacagcttcttaccctcagccagctctccatcctacccgccggggagtggccgacgctgccgtcccctgatgctggcgcgggcctgacgctggcgctggcggacgacgaggccttcaacttttactacccggataacctctcgctgcttgaacgctgcggagtgaatatcgtgcgcttcagcccgctgcacgatagcgagcttccaccgtgccagatgatttggctcggcggcggctatccggaaattcatgctgccgcgctggcggccaatacgccgatgctggcgcagctgcaggaggcgcaccggcgcggggtggcgatttacgccgaatgcggcggtctgatntatctcggcagctccctggaagacgccaacggtgatatctacccgatggccaaccttattcccggccatagcaaaatgggcaaacggcttacccgctttggctactgcgaagcgcgagctatgcgcaaaacgctgctggcggcgccgggcgaaaccctgcgcggacatgaatttcactactcggattttactcccgagtccccggcggttctggcctgccgcaaggtccgcgacggtatgacccttcagcagtggtccggcggctggcaggtgggcaacgcgttcgccagctatctgcacctgcactttgcgcagcgccccaccatgctcaaccactggctggctgcggcaaggagcgcgctatga

SEQ ID NO: 6636 - protein, 459 aa, Klebsiella oxytoca
  misc_feature (338)..(338): Xaa can be any naturally occurring amino acid
MAARQHAFILAGTGSGCGKTTVTLGLLSLLKQRGMRVQPCKVGPDYLDTGWHTAVSGVASRNLDSFMLPEPVLNALFCEQMQRADIAVIEGVMGLYDGFGTDPGYCSTAAMAKQLGCPVILLVDGKAVSTSIAATVMGFQHFDPSLNIAGVIVNRVNSESHYQLLKGAIERYCELPVLGYVPRVEGVALPERHLGLVTARESLVNQQPWRDFAQTLAQTLDIEQLLTLSQLSILPAGEWPTLPSPDAGAGLTLALADDEAFNFYYPDNLSLLERCGVNIVRFSPLHDSELPPCQMIWLGGGYPEIHAAALAANTPMLAQLQEAHRRGVAIYAECGGLXYLGSSLEDANGDIYPMANLIPGHSKMGKRLTRFGYCEARAMRKTLLAAPGETLRGHEFHYSDFTPESPAVLACRKVRDGMTLQQWSGGWQVGNAFASYLHLHFAQRPTMLNHWLAAARSAL

SEQ ID NO: 6637 - DNA, 1380 bp, Klebsiella oxytoca
  misc_feature (1346)..(1346): n is a, c, g or t
atggcagccaggcagcacgcattcattcttgcaggtaccggcagcggttgtggtaaaactacggtcacgcttggcctgctcagcctgttgaagcagcgcggcatgcgggttcagccctgcaaagtcggcccggactacctcgacaccggctggcacaccgccgtcagcggcgtcgcttcccgcaacctcgacagctttatgctcccggagccggtgcttaacgcgctattttgcgaacagatgcagcgggcggatatcgcggtcattgagggcgtgatggggctgtatgacggcttcggtaccgaccctggctactgcagcaccgccgcgatggctaaacagctcggctgtccggtcattttgctggtagatggcaaagcggtttccacctccatcgccgccacggtgatgggatttcaacacttcgaccccagtcttaacattgccggcgttatcgtcaatcgcgtcaacagcgaaagccattatcagcttctcaaaggcgccattgaacgctactgcgagctgccggtgctcggctacgtaccgcgagtggaaggggtggcgttacccgaacgccatctgggactggttaccgcccgcgagtcgctggttaaccagcagccgtggcgcgattttgcccaaacgctggcgcaaacgctggatattgaacagcttcttaccctcagccagctctccatcctacccgccggggagtggccgacgctgccgtcccctgatgctggcgcgggcctgacgctggcgctggcggacgacgaggccttcaacttttactacccggataacctctcgctgcttgaacgctgcggagtgaatatcgtgcgcttcagcccgctgcacgatagcgagcttccaccgtgccagatgatttggctcggcggcggctatccggaaattcatgctgccgcgctggcggccaatacgccgatgctggcgcagctgcaggaggcgcaccggcgcggggtggcgatttacgccgaatgcggcggtctgatatatctcggcagctccctggaagacgccaacggtgatatctacccgatggccaaccttattcccggccatagcaaaatgggcaaacggcttacccgctttggctactgcgaagcgcgagctatgcgcaaaacgctgctggcggcgccgggcgaaaccctgcgcggacatgaatttcactactcggattttactcccgagtccccggcggttctggcctgccgcaaggtccgcgacggtatgacccttcagcagtggtccggcggctggcaggtgggcaacgcgttcgccagctatctgcacctgcactttgcgcagcgccccaccatgctcanccactggctggctgcggcaaggagcgcgctatga

SEQ ID NO: 6638 - protein, 459 aa, Klebsiella oxytoca
  misc_feature (449)..(449): Xaa can be any naturally occurring amino acid
MAARQHAFILAGTGSGCGKTTVTLGLLSLLKQRGMRVQPCKVGPDYLDTGWHTAVSGVASRNLDSFMLPEPVLNALFCEQMQRADIAVIEGVMGLYDGFGTDPGYCSTAAMAKQLGCPVILLVDGKAVSTSIAATVMGFQHFDPSLNIAGVIVNRVNSESHYQLLKGAIERYCELPVLGYVPRVEGVALPERHLGLVTARESLVNQQPWRDFAQTLAQTLDIEQLLTLSQLSILPAGEWPTLPSPDAGAGLTLALADDEAFNFYYPDNLSLLERCGVNIVRFSPLHDSELPPCQMIWLGGGYPEIHAAALAANTPMLAQLQEAHRRGVAIYAECGGLIYLGSSLEDANGDIYPMANLIPGHSKMGKRLTRFGYCEARAMRKTLLAAPGETLRGHEFHYSDFTPESPAVLACRKVRDGMTLQQWSGGWQVGNAFASYLHLHFAQRPTMLXHWLAAARSAL

SEQ ID NO: 6639 - DNA, 462 bp, Klebsiella oxytoca
  misc_feature (256)..(256): n is a, c, g or t
atggatagcatcgatcgaaaaattcttgctgagctgcaggccgacgggcgactatcgataaccgagctggccgaacgggtgaatctcagtctttcgccctgccatcgacggctgcgcacgctggagcaggagggggtgattaccggctatcgggccaaccttgatccggccaaaatgggcttcaactttttggccatcgtcttcgcgacgctaaaagagggggacaaaaaagcggtaagcgcgtttgaggaagcgntcgaagagatcccgcaaatcgtgctggcgcagcgtctgtttggcgatccggactatctgatgcatgtggtgacgcgcgatcttccggccttccagaagctgtacgatgataaactctccgcaatgcccggcgtgcagcatttacgttcgacattggtcatgaagacggtcgtgcaggatcgcccttttccgctcggtaatgggtaa

SEQ ID NO: 6640 - protein, 153 aa, Klebsiella oxytoca
  misc_feature (86)..(86): Xaa can be any naturally occurring amino acid
MDSIDRKILAELQADGRLSITELAERVNLSLSPCHRRLRTLEQEGVITGYRANLDPAKMGFNFLAIVFATLKEGDKKAVSAFEEAXEEIPQIVLAQRLFGDPDYLMHVVTRDLPAFQKLYDDKLSAMPGVQHLRSTLVMKTVVQDRPFPLGNG

SEQ ID NO: 6641 - DNA, 1308 bp, Klebsiella oxytoca
  misc_feature (94)..(94): n is a, c, g or t
atgcaagcattgaaaatagctgtaatcggcggcggcagcagctatacgccggaacttatcgaaggcatcatccttcgccatcagcagattccgntcacggagctggcgctagtcgatgttgacgccgggcgcgagaaagtggcgattatcgccgcgctgacccagcgtatgtttaagcgccatggcctcgaacaggttaaggtcagcgtgcatttcagcctggatgaggccattcgcggcgctaaatttgtgctgactcagctgcgggttggtcagctggcggcgcgggcggcggatgagcgtctggggctgaagtatcagctgctgggccaggaaactaccggcgtcggcggatttgccaaagcgctgcgcactattccggtgattttacaggttgcccgcaaggtggaagcgctggcgcccgatgcctttatcctcaattttaccaatccggccgggattgtgacggaagcggtgagtcgctacagcagcgccaaaatcatcggcctgtgcaacgtgcccatcaatatgcagcatatgattgccggaatgctggacgcaaaagaagaggaggttcggctgagcttcgccgggctgaatcatatggtctgggtacacaaggtgatgcaggggcgggaagaggtgaccagcaaggtcatcgacatgctgtgtgacggtcaatcgctctcgatgaacaatattcaatcgctgccgtggccggcggagtttctgcgggccctgaaggcgatcccctgtccctatcatcgctattactggctgacgccggcgatgctggcggaagagattgaagcggcaaaaaccaaaggcacccgcgcagagcaggtgatgaaggtggaacaggagctgtttgatatctatgcccggcccgatctggatgaaaagcccgaacagctgagcttccgcggcggtgcgtactactccgaagtggcggtggagctgattaacgccatctacaacaatcttggcaaggagatggtcgtcaacacccgcaacaacggcgcgattcacggcttcgatgatgatgcggtggtggaaattaacagcattattgacgcgcagggcgcacgaccgctggcctttggcgcgctgccgccgatcatgaacggactgacgcaacaggtgaaagccttcgagcgcttgacgattgaggccgcggtccacggctgccgggatagcgcgctgctggcgctggtgagtaacccgctggtcgggaatgtgaccgatgcccgggcgctgcttgatgaggtgttaaccatcaaccgcccctggttaacgcagtttaactaa

SEQ ID NO: 6642 - protein, 435 aa, Klebsiella oxytoca
  misc_feature (32)..(32): Xaa can be any naturally occurring amino acid
MQALKIAVIGGGSSYTPELIEGIILRHQQIPXTELALVDVDAGREKVAIIAALTQRMFKRHGLEQVKVSVHFSLDEAIRGAKFVLTQLRVGQLAARAADERLGLKYQLLGQETTGVGGFAKALRTIPVILQVARKVEALAPDAFILNFTNPAGIVTEAVSRYSSAKIIGLCNVPINMQHMIAGMLDAKEEEVRLSFAGLNHMVWVHKVMQGREEVTSKVIDMLCDGQSLSMNNIQSLPWPAEFLRALKAIPCPYHRYYWLTPAMLAEEIEAAKTKGTRAEQVMKVEQELFDIYARPDLDEKPEQLSFRGGAYYSEVAVELINAIYNNLGKEMVVNTRNNGAIHGFDDDAVVEINSIIDAQGARPLAFGALPPIMNGLTQQVKAFERLTIEAAVHGCRDSALLALVSNPLVGNVTDARALLDEVLTINRPWLTQFN

SEQ ID NO: 6643 - DNA, 1356 bp, Klebsiella michiganensis
  misc_feature (172)..(172): n is a, c, g or t
atgtctcgtacttcatttattgaacgctatgtcattcccgccgcgctgaaaatcggcgggcagaagcatgtcctgtcggtacgtgacggcattatccttaatatgccgtttatgctgatcggttcgtttttcctgatattcgcttatctgccgatccctggttacggtgagntgatggccagcgtgtttggcgatgcctggcgcgataagatgctgtacccggtcaaagcgacctatgacatcatggcgctgctctccgccttcggcattgcctaccggctggcggagaaatatcgcaccctggatccgctaagcgccggggcgatgtcgctggtggcgtttgtgatgacaatcccccaggtgacgctctttacgccggcagacggttcagcggcgcaaatcgtcaaagacgtgctgccggtggggatgattggcagccagggactgtttgtggcgattgtgatttcgctgctctctacagagatttatcgcctggtggccagccgtaatctggtgatccgcatgccggacggcgtaccgcccgcggtggcgaaatcttttctcgccctgatccccggtttctgcgtgctggccgtggtgctggcgctgcgcctgatcgttgaagcttcgccgttcggcgatatcaatagcatgattaccacccttatcggtattcccatgtcgcacgtcggcggttcgctgccggggatgattatctcggtgatcctgattggtatcctgtggaccctggggctgcacggcgacaccattgtgctggtgtttattcgcccggtctggctgtcgaatatgtcggaaaacctggaagcgtttcagaatggactgccgatcccgcatatcattacccagcagttttatgatctgtggattgcgcccggcggtaccggtgcgctgctggggctggtgatttttatgctgctgcgcagccgtagccagcagatgaaacagctgggaaaaatcgccgcgccgggggcgctgtttaatatcagcgagccgatggtattcggcattccgctggtgatgaacccgtactttttcctgccgtttattttgacgccggtcctgctggtgattgtctcgtataccgcgatggccaccgggctggtaatgaagccggcggggattgcgctaccgtttaccacgcctatttttatgagcggctatctggcgaccggagggcatatttccggcgcggtgctgcaggtggtgaacctggcgatctcgctggtgatctactatccgttcttcctggtatgggatcgcctgaaggcgaaagaagagcaggcgtccgcgcagccggaggccagcgcgacgctgtcggcggctgaccgtatttaa

SEQ ID NO: 6644 - protein, 451 aa, Klebsiella michiganensis
  misc_feature (58)..(58): Xaa can be any naturally occurring amino acid
MSRTSFIERYVIPAALKIGGQKHVLSVRDGIILNMPFMLIGSFFLIFAYLPIPGYGEXMASVFGDAWRDKMLYPVKATYDIMALLSAFGIAYRLAEKYRTLDPLSAGAMSLVAFVMTIPQVTLFTPADGSAAQIVKDVLPVGMIGSQGLFVAIVISLLSTEIYRLVASRNLVIRMPDGVPPAVAKSFLALIPGFCVLAVVLALRLIVEASPFGDINSMITTLIGIPMSHVGGSLPGMIISVILIGILWTLGLHGDTIVLVFIRPVWLSNMSENLEAFQNGLPIPHIITQQFYDLWIAPGGTGALLGLVIFMLLRSRSQQMKQLGKIAAPGALFNISEPMVFGIPLVMNPYFFLPFILTPVLLVIVSYTAMATGLVMKPAGIALPFTTPIFMSGYLATGGHISGAVLQVVNLAISLVIYYPFFLVWDRLKAKEEQASAQPEASATLSAADRI

SEQ ID NO: 6645 - DNA, 1020 bp, Klebsiella aerogenes
  misc_feature (209)..(209): n is a, c, g or t
atgagcactattaaaagttacgccgccaaagaagcgggcgccgatctgtcgctgtgggagtacgatgccggcgaccttaagccggaagatgtcgaagtgcaggtggagtactgcgggatctgccactccgacctgtcgatgatcgacaatgaatggggcatgtcgagctatccgctggtggccggtcacgaagtgattggccgggtggnggccctgggcagcgcggcgcaggataaagggctgaaggttggtcagaaggtcggcattggctggacggcgcgcagctgcggccactgcgacgcctgtatcagcggcaaccacgtgaactgtctggaaggctcggtgcccaccatcatcaaccgcggcggcttcgccgataagctgcgcgccgactggcaatgggtgatcccgctgccggaaaacgtcgatcttgaatccgccgggccgatgctctgcggcggcattaccgtcttcaaaccgctgctgatgcatcacgtcacggccaacagccgcgtcggcgtcatcggcattggcggcctcggccatatcgccatcaagctgctgcacgcgatgggcgcggaagttaccgcttttagctccaatccggcgaaagagcaggaagtgctggcaatgggcgccgatcgcgtagtgaacagccgcgatcccgaagccttaaaggcgctggccggccagttcgacctgattatcaacaccgtcgccgtcgacctcgactggcagccgtactttgaagcgctggcgtacggcggcaacttccacaccgtcggggcagtgatgaagccgttcccggtccccgcttttaccctgattggcggcgaccgcagcatctccggctcggccaccggcaacccgtccgagctgcgcaagctgatgaaattcgccggacgcagcaaagtcgcgccgaccaccgagctgttcccgatgtcgcagatcaacgaggcgctgaagcacgttcgcgagggcaaggcccgctaccgcgtggtgctgaaagccgacttctga

SEQ ID NO: 6646 - protein, 339 aa, Klebsiella aerogenes
  misc_feature (70)..(70): Xaa can be any naturally occurring amino acid
MSTIKSYAAKEAGADLSLWEYDAGDLKPEDVEVQVEYCGICHSDLSMIDNEWGMSSYPLVAGHEVIGRVXALGSAAQDKGLKVGQKVGIGWTARSCGHCDACISGNHVNCLEGSVPTIINRGGFADKLRADWQWVIPLPENVDLESAGPMLCGGITVFKPLLMHHVTANSRVGVIGIGGLGHIAIKLLHAMGAEVTAFSSNPAKEQEVLAMGADRVVNSRDPEALKALAGQFDLIINTVAVDLDWQPYFEALAYGGNFHTVGAVMKPFPVPAFTLIGGDRSISGSATGNPSELRKLMKFAGRSKVAPTTELFPMSQINEALKHVREGKARYRVVLKADF

SEQ ID NO: 6647 - DNA, 621 bp, Shigella boydii
  misc_feature (493)..(493): n is a, c, g or t
atgagttatacactgcctgccctgccgtacgcttatgacgccctggaaccgcattttgacaagcagacgatggaaatccatcacactaaacaccaccagacctacgttaataatgccaacgcagcgctggaaagcctgcctgaattcgcgaacctgtccgcagaagagctgattaccaaactggatcagctgccggcagacaaaaaaaccgtgctgcgtaacaacgccggcggccacgctaaccacagcctgttctggaaaggcctgaaaaccggtactaccctgcagggcgacctgaaagcggctatcgagcgtgatttcggttccgttgacaactttaaagcggaatttgaaaaagcggctgctacccgtttcggctccggctgggcgtggctggtgctgaaaggcgacaagctggcggtggtttctaccgctaaccaggactccccactgatgggcgaagcaatctccggcgcttccggcttcccgattntgggcctggacgtatgggaacacgcttactacctgaaattccagaaccgtcgtccggactacattaaagcgttctgggacgtggtgaactgggacgaagcctcagcgcgttttgccgccaaaaaataa

SEQ ID NO: 6648 - protein, 206 aa, Shigella boydii
  misc_feature (165)..(165): Xaa can be any naturally occurring amino acid
MSYTLPALPYAYDALEPHFDKQTMEIHHTKHHQTYVNNANAALESLPEFANLSAEELITKLDQLPADKKTVLRNNAGGHANHSLFWKGLKTGTTLQGDLKAAIERDFGSVDNFKAEFEKAAATRFGSGWAWLVLKGDKLAVVSTANQDSPLMGEAISGASGFPIXGLDVWEHAYYLKFQNRRPDYIKAFWDVVNWDEASARFAAKK

SEQ ID NO: 6649 - DNA, 1368 bp, Citrobacter rodentium
  misc_feature (688)..(688): n is a, c, g or t
atgaatagctttgtagagtttatcgtcaaagatttgctcggccaggcttcgatattaattgcatttattgcgatgctgggcctgattttacaaaaaaaatcagcgggcaaaacggcggagggaacctttaaaacgctgctcggtttcttaataatgatggccggaatcaacattattgtcgccacgctaacgttccttaacgatatcttcacccagggattcggcatgaaaggctacattactgatgttgccgccatcgccgggttagccaaccgtgaattaggttccgaagtggcgctgaccctgatggtcatttttgccgttaacattattatcgcccgcctgacgccgctcaaatatatcttcctgaccggccaggctctgctgtggatggcgaccatcggcgcggtaataggctataaagccgggctgaccggactgtcgctgattttaaccggcggtattttcggcggcgtaatggcggtattgatgcccgctcttgcgcagccggtggtcagacgtattaccggttccgatgatgtggcgctggggcacttctgcaccatcggctatctggtgcaggcggcggtggctaaagtggtcgggaaaggttcccgctcaaccgaagatcttgagctacctgataactttaagttcctccaggatacctaccttgcgatggcggtgntaatggtgccgatgtacctcattcccgcgcttgccgcaggcccggaatatatcgctcagttctccggtggtattaactacctgatgtacgcctttatgcagtctattcagtttgtggcgggggtattcgttctctatagcggcgtgcgcttattgcttaacgagctggtgccggcattccgcggcatcgccatgcgcattgtcccggacgcaaaacccgcgctggattgcccggtactgttcccctatgcgcccaatgcggtgattgtcggcttcctggcaacgaccgtcggttccattatcggcatgctggtattcccgatgtttggtctggcgatgatcctgcccggcctgttaaccaacttctttgccggcggtacggcaggcgtgtttggcaacgcgctgggcggccggcgcggagcgatgattggcggcgtcattcacggcctgtttattacctttctgcccgccattttagtgccgatgctggaaagctacggctttaccggcgtcactttcagcgattctgacgtcattagttccggtctggtattgggccacgccttccagaataactggctatttgttgctctgttcattgtttttgttgccgcactggcatggttcgtaaacggtaaatcagctaagccaaaaggggaaaatattcatgagtctgtataa

SEQ ID NO: 6650 - protein, 455 aa, Citrobacter rodentium
  misc_feature (230)..(230): Xaa can be any naturally occurring amino acid
MNSFVEFIVKDLLGQASILIAFIAMLGLILQKKSAGKTAEGTFKTLLGFLIMMAGINIIVATLTFLNDIFTQGFGMKGYITDVAAIAGLANRELGSEVALTLMVIFAVNIIIARLTPLKYIFLTGQALLWMATIGAVIGYKAGLTGLSLILTGGIFGGVMAVLMPALAQPVVRRITGSDDVALGHFCTIGYLVQAAVAKVVGKGSRSTEDLELPDNFKFLQDTYLAMAVXMVPMYLIPALAAGPEYIAQFSGGINYLMYAFMQSIQFVAGVFVLYSGVRLLLNELVPAFRGIAMRIVPDAKPALDCPVLFPYAPNAVIVGFLATTVGSIIGMLVFPMFGLAMILPGLLTNFFAGGTAGVFGNALGGRRGAMIGGVIHGLFITFLPAILVPMLESYGFTGVTFSDSDVISSGLVLGHAFQNNWLFVALFIVFVAALAWFVNGKSAKPKGENIHESV

SEQ ID NO: 6651 - DNA, 381 bp, Klebsiella oxytoca
  misc_feature (130)..(130): n is a, c, g or t
atgccgcattttatcgctgaatgtaccaacaacatccgtgagcaggctgatttaccgggtctgttcagcaaagtgaacgccgcgctggcggcaaccggcatctttcctatcggcggcattcgcagtcgcnccatctggctggatacctggcagatggccgatggccagcatgactacgccttcgtgcatatgacgctaaagattggtaccggacgcagcctggagagccgtcaggacgtgggcgatatgctgttcacgctgatcaaagcccattttgccgcgctgatggagagccgctatctggcgctgtcgtttgagatcgatgaactgcacccgacgctgaactacaagcagaacaacgtacacgcgttgtttaaatag

SEQ ID NO: 6652 - protein, 126 aa, Klebsiella oxytoca
  misc_feature (44)..(44): Xaa can be any naturally occurring amino acid
MPHFIAECTNNIREQADLPGLFSKVNAALAATGIFPIGGIRSRXIWLDTWQMADGQHDYAFVHMTLKIGTGRSLESRQDVGDMLFTLIKAHFAALMESRYLALSFEIDELHPTLNYKQNNVHALFK

SEQ ID NO: 6653 - DNA, 783 bp, Klebsiella oxytoca
  misc_feature (451)..(451): n is a, c, g or t
atgaaaatattactggtttacgcccatcctgaaccgcgttcgcttaacggcgcgctgaaagattttaccgtgcaacatctacaaaacgccggtcacgacgtgcaggtgtccgatctctacgccatgcgctggaaggcgggatttgatgccgacgacagcagcgccccgccagtgggtgcaagctggcgggcgacgcgagattcgcaatatgccttcgctcacggcacgcagagcgcggatatcgtgggcgaacaggagaagctgctgtgggccgatacggtgattttccagttcccgctgtggtggttttcactgcccgccatcatgaaaggctggattgatcgggtttacgcttacgggtttgcctacggcgtcggcgagcatagcgatacgcactggggcgatcgctacggcgaaggcacgttcgcgggtaaacgggcgatgctggtcnttaccgccggcggatgggcggagcactatgctccgcgtggaattaacgggtctatcgacgacattctgttccccattcagcacgggatgctgttctatcccggatttgaggtgctgccgccggtggtgttctaccgcaccgacaaactcgatgaacagcgcttcgccatcctgcgcgaggagctggcccggcggctggataccctctctgaaacgccgcccattcccttccgccgtcagaatcacggcgactatttgatcccctctctgaacctgcgtccggagctggcgcctggagaaaatggcctcgctatccacgtgaagcctatgtga

SEQ ID NO: 6654 - protein, 260 aa, Klebsiella oxytoca
  misc_feature (151)..(151): Xaa can be any naturally occurring amino acid
MKILLVYAHPEPRSLNGALKDFTVQHLQNAGHDVQVSDLYAMRWKAGFDADDSSAPPVGASWRATRDSQYAFAHGTQSADIVGEQEKLLWADTVIFQFPLWWFSLPAIMKGWIDRVYAYGFAYGVGEHSDTHWGDRYGEGTFAGKRAMLVXTAGGWAEHYAPRGINGSIDDILFPIQHGMLFYPGFEVLPPVVFYRTDKLDEQRFAILREELARRLDTLSETPPIPFRRQNHGDYLIPSLNLRPELAPGENGLAIHVKPM

SEQ ID NO: 6655 - DNA, 1155 bp, Klebsiella oxytoca
  misc_feature (163)..(163): n is a, c, g or t
atgagtgaatttttgctgaaaccccggattcgctttggtcaggatgcgcttgccatcctgaacgagctgcccgcccgcaacgtgctgctggtcaccgaccaggcgatggttaagtttggcctcgccgatcgcgtcacgcagatcctccatgcgcgcggcatcnctttccaggtctgggacgacgtggtggccgacccggatatcgccaccgtggtgcgcggtatgaagcggatggatacccgctatccggatctggttatcgcgctgggcggcggttcggtgattgatgcagccaaagcggttattttcgccctggcgcaaacccgtccggacgctcaccgcgagccgccctgctttgtggcgatccccaccaccagcggcaccggctctgaagtcaccgccttttcagtggtaaaagcacacgccgagaagctggtactggtggacccgtcgctgctgccggatatcgccattcttgacccggcgctggtggcctcggtgccgccggcgatcaccgccgataccggtatggacgtgctgtgtcacgcgctggaagcctatgtctccctcgccgccagcgacttttccgatgcgctggcggagaaagtggtgcagcaggtatttcgctttctgccggcctgctggcgcaacggtgccgacctgctggcgcgggaaaagatgcacaacgcttcctgcatggcgggcatggccttcaccaacgcctcgctgggcattacccacagccttgcccacgcgctcggcggcgtgtttcgcgtcccccacggtcgcgccaacgccctgctgatggcggacgtggtggcctggaacgccgattatcacgggctgtgcgataccgatgccgcccgcaaatatgcccgattagcccatctgctggatctgcctgcggccactacccgccagggcgtcgccagtctgctggtcgccattcaggcgcttaaagacgaaatgagcatgccggccggcatccgcgataccggcgtccttgcagacgagtttgaacaacggctggcggagatggtcggccaggcgttacgcgacagctgtaccccgacgaacccacgcgcgccggatgctcacgcactgaccgaactctatcgccgggcatggaccggcaacgcagttcagggccactga

SEQ ID NO: 6656 - protein, 384 aa, Klebsiella oxytoca
  misc_feature (55)..(55): Xaa can be any naturally occurring amino acid
MSEFLLKPRIRFGQDALAILNELPARNVLLVTDQAMVKFGLADRVTQILHARGIXFQVWDDVVADPDIATVVRGMKRMDTRYPDLVIALGGGSVIDAAKAVIFALAQTRPDAHREPPCFVAIPTTSGTGSEVTAFSVVKAHAEKLVLVDPSLLPDIAILDPALVASVPPAITADTGMDVLCHALEAYVSLAASDFSDALAEKVVQQVFRFLPACWRNGADLLAREKMHNASCMAGMAFTNASLGITHSLAHALGGVFRVPHGRANALLMADVVAWNADYHGLCDTDAARKYARLAHLLDLPAATTRQGVASLLVAIQALKDEMSMPAGIRDTGVLADEFEQRLAEMVGQALRDSCTPTNPRAPDAHALTELYRRAWTGNAVQGH

SEQ ID NO: 6657 - DNA, 987 bp, Klebsiella oxytoca
  misc_feature (274)..(274): n is a, c, g or t
ttggacacggatgtcccgatcgtatttctggaggtaaatgtgagcgcaaaacaagaattaaccgggcgaatattcaatattcagaaatattcgatctatgacggcgatgggatccgcacgctggtttttttcaaaggctgcaatattcgctgcccgtggtgcgctaacccggaagggctgaatagccagtttcaggtgatgttctcccaggacaaatgcattaactgcggcgactgcgtcaacgtctgcccggcgggaattcattatcgggcgnaagaaaacggcgaaatgaagcacttcgtcaaccgcaataaagactgcatcggctgccgcaagtgcgaagagatatgcacgcagaacgcgctggatattatgggtaaagatgtcaccgtcagcgaactgatggagatcatcatgcaggactacgacttttatatctcctccggcggcggcgtcaccatcggcggcggagaaatgagcctgcagaccgattttgccgtcgcgctatttagcgaatgcaaaaagatgatgctcaataccgcggtggaaacgcagggcactacgccgctggctaattatcaaaagctggcgccggtgaccgacaccttcttattcgatattaagcaaattaatagcgagcaccataaagcgttatttggcattggtaacgaaggcattcgccgcaacctggagtggctggtggattccggcgctaacgtcattatccgcatgcccctggttcgcggctataacgactcgttcgatgccattaccggggccattgattatgtacaaaagctggcgaagcgcggaaatatccgccgcatcgatatgctgccgtaccaccagctcgggcgcaaaaaatatgagcgcctcgatatgccctaccccatcgcccgggacccgacatattccgccgaagagttagaccggctggaaacgttcttcacgcagtttgattttgatattcgcttagtccgccattaa

SEQ ID NO: 6658 - protein, 328 aa, Klebsiella oxytoca
  misc_feature (92)..(92): Xaa can be any naturally occurring amino acid
MDTDVPIVFLEVNVSAKQELTGRIFNIQKYSIYDGDGIRTLVFFKGCNIRCPWCANPEGLNSQFQVMFSQDKCINCGDCVNVCPAGIHYRAXENGEMKHFVNRNKDCIGCRKCEEICTQNALDIMGKDVTVSELMEIIMQDYDFYISSGGGVTIGGGEMSLQTDFAVALFSECKKMMLNTAVETQGTTPLANYQKLAPVTDTFLFDIKQINSEHHKALFGIGNEGIRRNLEWLVDSGANVIIRMPLVRGYNDSFDAITGAIDYVQKLAKRGNIRRIDMLPYHQLGRKKYERLDMPYPIARDPTYSAEELDRLETFFTQFDFDIRLVRH

SEQ ID NO: 6659 - DNA, 1143 bp, Klebsiella michiganensis
  misc_feature (1046)..(1046): n is a, c, g or t
atgacccaggccttctcaattcctcgcagtattatttatggcgaaaatgctttagagcatctttccaccctgagcggaaaaaaagctgcattagtcaccggcggcagttcaatgaagcgttttggctttctggataaagccgtcagcgaactcaataaagcgggtatggagtgcattattatcgataatgttgaacccaatccgtccattaaaaccgtctggcgcggagccaaagcgatgctggcctttgaacctgactggatagtggccattggcggcggttccgcgctggatgccgctaaagttatgtggtgtttctatgaacatccgcagctgaagtttgaggatattattcccgtcggtgccatgccgccgctgcgcagcaaagcacggtttgtggcgatcccctccaccagcggcagcgcgtccgaaatcaccgccttctcggtgatcaccgatacggcaaatcatatcaaatacccgattgttgccgccgatctggtgccggatatcgccattctcgaccccactattccggcaaaaatgccgcctcacgtgacggttcacaccggcatggacgttttgacccatgcgattgaagcctacgtctccactgcagccaactcgtttaccgacccttatgcggtagaggccattcggctggtatttaagcatctggaaaccgcctggcgctcacccgatgatttaaatgcccgcatgcatatgcataatgcttccgcgctggcgggaatcgccttcaccaatgcgtcactgggattagtgcattcgatggcgcataaaattggcggcgaatttggcattactcacggtctggcgaatgcgattatgttgccgtatatcattcaatataatgcgaagttcaccaaaaaatatcgtcagctggaagccgcattaggtatggataatttaattgccgcgatcaatgcgctgaatcaacggctgggcgtcccgaaaacgctgagccagtgtgacgaagtggaaatcaatgaagtgacctttgttaatgtgctcgaccgaatgagtcnccatgccgtcgacgatccctgtacgttaaccaatcctaactatccgtcagttcaggacgttaaagggttgtacaccctggcattctacggcgcttga

SEQ ID NO: 6660 - protein, 380 aa, Klebsiella michiganensis
  misc_feature (349)..(349): Xaa can be any naturally occurring amino acid
MTQAFSIPRSIIYGENALEHLSTLSGKKAALVTGGSSMKRFGFLDKAVSELNKAGMECIIIDNVEPNPSIKTVWRGAKAMLAFEPDWIVAIGGGSALDAAKVMWCFYEHPQLKFEDIIPVGAMPPLRSKARFVAIPSTSGSASEITAFSVITDTANHIKYPIVAADLVPDIAILDPTIPAKMPPHVTVHTGMDVLTHAIEAYVSTAANSFTDPYAVEAIRLVFKHLETAWRSPDDLNARMHMHNASALAGIAFTNASLGLVHSMAHKIGGEFGITHGLANAIMLPYIIQYNAKFTKKYRQLEAALGMDNLIAAINALNQRLGVPKTLSQCDEVEINEVTFVNVLDRMSXHAVDDPCTLTNPNYPSVQDVKGLYTLAFYGA

SEQ ID NO: 6661 - DNA, 1512 bp, Klebsiella oxytoca
  misc_feature (796)..(796): n is a, c, g or t
atgactactgtaccaagactgaaatatttcgttgatggtcaatggcgcgtttcgcagaccgaacgctatatggacgtctataacccaagtaccggggaagtcatggctcaggccccctgctgcaccgagcaagaagtgctggatgccgttgccgcggcgcgcaaagcctttccggcgtggtcagatactccggcgattaaacgctcgcaaattatgtttcgcgttcgtgaattattaatccagcatcaggatcgcttaaccgagctggtggcgaaagaaaacggtaaagcctggggagatgctcagggcgatgtattaaaagcgaaagagggcaccgagcttgcctgctctatcccgactctgctggcgggtgaaaatctgatggacgcgtcagccgggatcgacaccaacctttaccgtgagccgattggcgtgttcgccggcattgtgccgtttaacttcccggcgatgattccgatgggatggatggcgccgctatgcgtcgcatccggtaacactatggtgattaaagcggccagtatgacgccgatgacctgtatggaaatcaccaaactctatcaggaagcgggcgtaccggatggcgtgattaacatcgtgacctgttcacgtaacgaagccgatattctgctgacccatccggacgttaacggcgtctcattcgtcggctcgacgtccgtcggcctgcacgtatactccaaagccgccgcccacggcaaacgcgtccaggcgctgtgcgaagcaaaaaaccatgccctggtgctggccgatgcgccanttaaccgtaccgccgccggtattatcaacgccgcgttcggctgcgcgggcgaacgctgtatggcgctgccggtcgtcgtggtgcaggaagagattgccgacaagctgattgccgccgtcgtcgaaaaagccaaacagctgaaaatcggccccggctatctgcgcgataccgacatgggtccggtgatttctaaagaccataaacaatccgtcatcaactggattaataaaggcatcgaagagggtgcgaagctggtgctcgatggtcgcgatattaaggtgccgggccaggaaaaaggcttctatgtcgggccgactatactcgatggcgtgaccgaggagatgagcgtcgggacgcaggaaattttcgggccggtcctgtgctttaagcgggtaaaaaccttcgaagaaggtctgaaattaatgaacaataacccgtttgccaacggctcggttattttcacccaaagcggctactacgcccgcgagttccagaaacgcacccacggcggtatggtcggtattaacgtcggcatcccggtgccggtcggcgtattccccttctcaggtcataaacagtcgttcttcggcgacctgcactgcctgggcaaagatggcgttcgtttctatacagagtccaaatgcgtgacttcgcgctggtttgatgaagaagaagcaaaacgcgaaaaagtcgactcctgggacggtacgatttaa

SEQ ID NO: 6662 - protein, 503 aa, Klebsiella oxytoca
  misc_feature (266)..(266): Xaa can be any naturally occurring amino acid
MTTVPRLKYFVDGQWRVSQTERYMDVYNPSTGEVMAQAPCCTEQEVLDAVAAARKAFPAWSDTPAIKRSQIMFRVRELLIQHQDRLTELVAKENGKAWGDAQGDVLKAKEGTELACSIPTLLAGENLMDASAGIDTNLYREPIGVFAGIVPFNFPAMIPMGWMAPLCVASGNTMVIKAASMTPMTCMEITKLYQEAGVPDGVINIVTCSRNEADILLTHPDVNGVSFVGSTSVGLHVYSKAAAHGKRVQALCEAKNHALVLADAPXNRTAAGIINAAFGCAGERCMALPVVVVQEEIADKLIAAVVEKAKQLKIGPGYLRDTDMGPVISKDHKQSVINWINKGIEEGAKLVLDGRDIKVPGQEKGFYVGPTILDGVTEEMSVGTQEIFGPVLCFKRVKTFEEGLKLMNNNPFANGSVIFTQSGYYAREFQKRTHGGMVGINVGIPVPVGVFPFSGHKQSFFGDLHCLGKDGVRFYTESKCVTSRWFDEEEAKREKVDSWDGTI

SEQ ID NO: 6663 - DNA, 1011 bp, Klebsiella oxytoca
  misc_feature (29)..(29): n is a, c, g or t
atgtcgcatgaagcttacgtccatatccncgacctgcgggttgagtttcgccgcgacggtcagacggtcaacgcggtcaacggcgtctcctttgatgtacaaaaaggcgaggtgatggcgctgatcggcgaatctggctccggtaaaagcgtcaccctgcgcgccctgatgcgcctgcatccgccaaaaagcagcgtgctttccggcacgctgagggtcggggaagaggaggtgttgaagatgagcgccgggcagctgcggcgctaccgcggcgcgcgctgcgcgatgattttccaggagccgctgctggccttcgacccggtctataccgtgggccagcagattgtcgaagggctgcgtcgccatgaaggcctgtcgcgacaggcggcgcgggaaagggcgctcgaggcgctgcgccaggtacgcattccgagccccgagcggcggctggatgcttacccgcacgagatgtccggcggaatgcgccagcgggcgatgattgccctcgcgctctcctgcaacccgcagctgctgctggcggatgagccaaccaccgcgctcgatgccacggtgcaaatacagatcctgatcctgctgcgcgagcagcaaaagcagcgcgatctgtcgatcatttttgtgacccacgatatcggcgcggcggtggagatcgccgaccgggtagcggtaatgtacgccggacgcatcgtggaagaggcgtcgattgaggagattctgtatcgtccgcgccatccctatacccaggtgctgctgggcagccggccgaaagaggggctgaaaaagggcgacgcgctgcactgtatccccggctcgccgccggatctctcgcgtctgccgcccggctgcgcgttcgccgatcgctgtccgcacgcgcgccccgcctgtgcgcagagccagccggctaccgaaccggccgggccgcgtcacgtggtgagctgccatcgctggcgtgagctgagtgcgtccgttgaaaaccaggcgctttacgcctga

SEQ ID NO: 6664 - protein, 336 aa, Klebsiella oxytoca
  misc_feature (10)..(10): Xaa can be any naturally occurring amino acid
MSHEAYVHIXDLRVEFRRDGQTVNAVNGVSFDVQKGEVMALIGESGSGKSVTLRALMRLHPPKSSVLSGTLRVGEEEVLKMSAGQLRRYRGARCAMIFQEPLLAFDPVYTVGQQIVEGLRRHEGLSRQAARERALEALRQVRIPSPERRLDAYPHEMSGGMRQRAMIALALSCNPQLLLADEPTTALDATVQIQILILLREQQKQRDLSIIFVTHDIGAAVEIADRVAVMYAGRIVEEASIEEILYRPRHPYTQVLLGSRPKEGLKKGDALHCIPGSPPDLSRLPPGCAFADRCPHARPACAQSQPATEPAGPRHVVSCHRWRELSASVENQALYA

SEQ ID NO: 6665 - DNA, 2250 bp, Escherichia coli
  misc_feature (1234)..(1234): n is a, c, g or t
atgaataacaggatcaaatccctggccttgctggtcaatctgggaatctacggggctgcttttccgctaagcgcggcggaaacggtctccgatagcaaaaccgcaaccgctgatgaaaccatggttgtcaccgccgccgagcagaacctgcaggcgcctggcgtatcaaccatcaccgcagatgaaattcgtaaacgtccgcctgcgcgagacgtatctgaaattatccgtaccatgccgggcgtaaacctgaccggcaactccaccagcggccagcgcggcaacaatcgccagattgatattcgcggcatgggcccggaaaacaccctgatcctgattgacggcaagcccgtgaccagccgcaactccgtacgtctgggctggcgcggcgagcgcgatacccgcggcgatacctcatgggtaccgccggagctgatcgaacgtattgaagtcattcgcggcccggcggccgcgcgctacggcaacggcgcggcgggcggcgtggtcaatatcatcaccaagaagagcgacggcgaatggcacggttcatggaatacctacatgaacgccccggagcataaagacgaaggttcgactaaacgcaccaactttagcctcagcggcccactggggggcgatttcagcttccgcctgctgggtaacctcgacaaaacccaggccgatgcctgggatatcaacgacggacatcaatccgagcgtaccggcacctatgccaataccatgcctgccgggcgtgaaggggtgaaaaataagaatattaacggcgtcgtgcgctgggatttcgcgccgatgcagtcgctggagtttgaatccggctacagccgtcagggcaacctctacgcgggcgatacgcagaacaccaatactaacgatctggtgaaagagaactacgggaaagagacgaaccgcctctatcgccagacttattccgtcacctggaacggcggctgggataacggcgtgaccaccagcaactgggcccagtacgaacgtacccgtaactcgcgtaaaggcgaaggtctggcgggcggcacggaaggtatcttcaacagcaaccagttcagcgatatcgacctcgccgacgtgatgctgcacagcgaagtcaacatccctctggatctggtgtttaaccagaacctgacgctgggctccgagtggaatcagcagcggatgaaggatttggcgtcaaatacccagacctttatgggcggcnatatcgacggctatgacagcaccggccgtagcccatactcgaaggccgagatcttctccctgtttgccgaagacaacgtggagctgaccgacaccaccatgctgacgccggcgctgcgtttcgatcatcacacgatcgtcggcaacaactggagcccgtcgcttaacttgtctcagggtctgtgggatgacttcacgttaaaaatgggcatcgcccgcgcctataaagcgccgagcctgtaccaaaccaacccgaactatattctctatagtaaaggccagggctgctatgccagcggcaacggtaccggttgctacatgatgggtaacgatgacctgaaagccgaaaccagcatcaacaaagagattggccttgagtttaaacgcgacggctggctggcgggtgtgacatggttccgtaacgactaccgcgataaaatcgaagcgggctacgcgccgatttcacagacgacgaacggtaaagtgaaaaccgatatctatcagtgggaaaacgtgcctaaagcggtggttgaaggtctcgaaggcaccctgaacgtgccggtcagcgaaacggtgaactggaccaataacatcacttatatgctgcaaagtaaaaacaagaaaaccggcgatcgtctgtcgattattccggaatataccctgaactccactctgagctggcagattcaggaggatatttcggtgcagtcgaccttcacctggtacggcaagcagcagccgaagaaatataactacaaaggtgagccggcggtgggttctgaaacggatgaagtcagcccttacagcatcgttggcctgagcgccacctgggatgtgacgaaaaacgtcagcctgaccggcggcgtggataacgttttcgacaagcgccactggcgcgcgggtaatgcgcaaaccaccggtagcctgacggatgtttcttatatggctggcgctggcgccaatacctataacgaatcaggccgcacctggtatctgggcgtcaatacccacttctga

SEQ ID NO: 6666 - protein, 749 aa, Escherichia coli
  misc_feature (412)..(412): Xaa can be any naturally occurring amino acid
MNNRIKSLALLVNLGIYGAAFPLSAAETVSDSKTATADETMVVTAAEQNLQAPGVSTITADEIRKRPPARDVSEIIRTMPGVNLTGNSTSGQRGNNRQIDIRGMGPENTLILIDGKPVTSRNSVRLGWRGERDTRGDTSWVPPELIERIEVIRGPAAARYGNGAAGGVVNIITKKSDGEWHGSWNTYMNAPEHKDEGSTKRTNFSLSGPLGGDFSFRLLGNLDKTQADAWDINDGHQSERTGTYANTMPAGREGVKNKNINGVVRWDFAPMQSLEFESGYSRQGNLYAGDTQNTNTNDLVKENYGKETNRLYRQTYSVTWNGGWDNGVTTSNWAQYERTRNSRKGEGLAGGTEGIFNSNQFSDIDLADVMLHSEVNIPLDLVFNQNLTLGSEWNQQRMKDLASNTQTFMGGXIDGYDSTGRSPYSKAEIFSLFAEDNVELTDTTMLTPALRFDHHTIVGNNWSPSLNLSQGLWDDFTLKMGIARAYKAPSLYQTNPNYILYSKGQGCYASGNGTGCYMMGNDDLKAETSINKEIGLEFKRDGWLAGVTWFRNDYRDKIEAGYAPISQTTNGKVKTDIYQWENVPKAVVEGLEGTLNVPVSETVNWTNNITYMLQSKNKKTGDRLSIIPEYTLNSTLSWQIQEDISVQSTFTWYGKQQPKKYNYKGEPAVGSETDEVSPYSIVGLSATWDVTKNVSLTGGVDNVFDKRHWRAGNAQTTGSLTDVSYMAGAGANTYNESGRTWYLGVNTHF

SEQ ID NO: 6667 - DNA, 3882 bp, Klebsiella oxytoca
  misc_feature (3553)..(3553): n is a, c, g or t
atgaccacacgtttaccgctggttgcggctcagccggggatctggatggcggagcgcctctcgacgctgcccggcgcctggagcgtggcccactatgttgagctgcgcggcgatatcgacccgaccttgctcgggcgggcgattgtcaccgggctctctcaggctgacaccctcagcatgcgtttttgtgaagataacggcgaagcctggcagtgggtcgatgaaaatcgtcattttgccgagccggactatcgggatctgcgcacgtcgcacgacccgcacgctgccgcgctggcgctgatgcaggccgacctcgggcaaaacctgcgcgtggacggcggtaatccgctggtctgccatcagctgctgcgggtgggggataagtgctggtactggtatcagcgttaccatcatttgctggtcgatggcttcagtttcccggccattacccgccagatcgccgcgatttatcgcgcatggcagcgcggcgaagagacgccagcttcgccgttcacgccgtttgccgaggtggtggaagagtaccagcgctactacggcagcgacgcctggcagcgtgataaacagttctggcaggcgcagcgtcaggcgctgccggctccggcctccctttccgacgcgccgctggcgggaagggcgaccagcaccgatatctggcgcatgaagctggaggtcgacgccggcgtatttagccggctggcggcaggcgcgccgcagtgccagcgcgcggatctggcgctggcgctgaccgccctgtggctgggacggctgtgcagccgaatggattacgccgcgggctttattttcatgcgccgcatgggctctgcggcattaaccgctaccggcccggtgctcaacgttctgccgctggcggtcaatattgacgcccgggaaacgctggcggagctggccatgcgtcttgccggacagctcaagaaaatgcgccgccaccagcgctatgatgccgaacagattgtccgcgacagcggcagggcggcgggcgatgaaccgctgtttggcccggtactcaatattaaagtcttcgactatcagctggatatcgacggcgtacaggcgattacccacaccctggccaccggcccggtcaatgacctggagctggcgctcttcccggatgaaaccggcggtctatcgctggaggtgctggcgaacaagcagcgatatgatgaacagacgctgcgcgggcatatcgcccgtctatcttctttgctgactcagtttgccgataatcccactctgccctgcggcgaggcgaatatgctgtcggcggcggaaaaccaacgcctggcgcaggtgaacgcgaccgctgtcgacctgccgctcaccaccctgagcgcgctggtggcggcgcaggcggcaaaaaccccggatgccccggcgctggcggatggctgctggcagtttagctaccgtgagatgcgccagcaggtggtagcgctggccgagcgtctgcgcgcacggggcgtcaaaccgggcgatagcgtggcggtcgcgctgccgcgttcggtgttcctgacgctggcgctgcacggcattgttgaggccggagccgcgtggctgccgctggataccggctatcccgacgaccgcttgcggatgatgctggaagacgcccgtccgtcgctgctgatcacctctgaggatcagctggcgcgctttagcgatattcccggcctggaaagcctctgctaccagcagccgctggcggcgggcgagtccgcgccgctggcgctctcgcagccggagcataccgcgtatatcatctttacctccggctccaccgggcggccgaaaggggtgatggtcgggcagaccgccatcgtcaaccgcctgctgtggatgcaggaccactatccgctctgtgctgaggatgtggtggcgcagaaaacgccgtgcagctttgatgtctcggtatgggagttctggtggccgtttatcgccggcgcgcagctggtgatggccgagccggaagcccaccgcgacccgctggcgatgcagcagttttttgcccgctacggcgtgacaacgacccactttgtgccgtcgatgctcgcggcgttcgttgcctcgctggaggcggaaaacgtcgattgttgtcaaaccctgcgccgggtattctgtagcggagaggcgctgccgacggcgctatgccgtgaatgggagcagctcaccggcgcgccgctgcataacctgtacggcccgacggaagccgcggtggacgtcagctggtatccggcctgcgggcccgaactggcggcagtcaccggcgccagcgtaccgattggctggccggtgtggaataccggcttgcgcatccttgatgccgccatgcgcccggtaccgccgggcgtggcgggggatctctacctgaccggcattcagctggcgcagggctatctggggcgtcccgatttgaccgccagccgctttattgccgacccctacgcgccgggcgagcggatgtaccgcaccggcgatgttgcccgctggctggataacggcgcggtcgagtatctcggacgcagcgacgaccagctaaaaatacgcggccagcgaattgagctgggcgaaattgaccgcgcgctatctgcgctgccggacgttgcgcaggcggtggctcacgcctgcgtcttcaaccaggcggcggcgaccggcggcgatgcccgtcagctggtgggctatctggtttctgcttccggtctgccgctggacaccgccgcgctcaaagcgcagcttggcgaacagctaccgccgcatatggtgccagtggtgctgattcagctgccggcgctgccgctaagcgccaatggcaagctggatcgtaaagcgctgccgttacccacgttgagcagtgagcgcagcggacgtccgccggagccgggcgtggaaactgccgttgccgcagcgttcagccagctgctcggctgtgaggtgaacgacatcgacgccgatttcttcgcccttggcggccattcgctgctggcgatgcgcctggcggcgctgctgagccgcgaactggaacgccaggtgacgcctggccagataatggtcgcttcttccgtcggcaagctgagcgcgctgctggcatcggatctgagcgatgagcaggcgcaacggctgggcttcgacgcgatcctgccgctgcgcgagagcgacggtccgacgctgttttgcttccatccggcttccggttttgcctggcagttcagcgtgctggcgcgttatttaagcccgcgctggtcgatcgtcggcattcagtcgccgcgaccgcaggggccgatggcgacggcggcggatctggatgcggtatgcgaacatcatctgcaaaccctgctttcgcagcagccgcgcggcccgtactatctgtttggctattcgctcggcggtaccctggcgcagggaattgccgcccgtttacgccagcgcggcgaagcggtggccttcctcgggctgctggatacctggccgcccgagacgcagaactgggcggagaaagaggcgaacggtctggatnctgaggtgctggcggaaattgcccgcgaacgtgaggcgtttctggccgcccagcaggggcaggcttccggcgagctgttcagcgtgattgaaggcaactatgccgatgcggtgcgcctgctgactaccgcgcacagcgcgaagtttgacggtaaggcgacgctgttcgtggcggagaaaacccggcaacccgggatggacccgcaggtggtgtgggggccgtggatcggcgagctggaggtgtttagccaggattgcgcccacgtggatattatctctccgcaggcttttgaagcgatcggtccggtggtcagggagatactcggttag

SEQ ID NO: 6668 - protein, 1293 aa, Klebsiella oxytoca
  misc_feature (1185)..(1185): Xaa can be any naturally occurring amino acid
MTTRLPLVAAQPGIWMAERLSTLPGAWSVAHYVELRGDIDPTLLGRAIVTGLSQADTLSMRFCEDNGEAWQWVDENRHFAEPDYRDLRTSHDPHAAALALMQADLGQNLRVDGGNPLVCHQLLRVGDKCWYWYQRYHHLLVDGFSFPAITRQIAAIYRAWQRGEETPASPFTPFAEVVEEYQRYYGSDAWQRDKQFWQAQRQALPAPASLSDAPLAGRATSTDIWRMKLEVDAGVFSRLAAGAPQCQRADLALALTALWLGRLCSRMDYAAGFIFMRRMGSAALTATGPVLNVLPLAVNIDARETLAELAMRLAGQLKKMRRHQRYDAEQIVRDSGRAAGDEPLFGPVLNIKVFDYQLDIDGVQAITHTLATGPVNDLELALFPDETGGLSLEVLANKQRYDEQTLRGHIARLSSLLTQFADNPTLPCGEANMLSAAENQRLAQVNATAVDLPLTTLSALVAAQAAKTPDAPALADGCWQFSYREMRQQVVALAERLRARGVKPGDSVAVALPRSVFLTLALHGIVEAGAAWLPLDTGYPDDRLRMMLEDARPSLLITSEDQLARFSDIPGLESLCYQQPLAAGESAPLALSQPEHTAYIIFTSGSTGRPKGVMVGQTAIVNRLLWMQDHYPLCAEDVVAQKTPCSFDVSVWEFWWPFIAGAQLVMAEPEAHRDPLAMQQFFARYGVTTTHFVPSMLAAFVASLEAENVDCCQTLRRVFCSGEALPTALCREWEQLTGAPLHNLYGPTEAAVDVSWYPACGPELAAVTGASVPIGWPVWNTGLRILDAAMRPVPPGVAGDLYLTGIQLAQGYLGRPDLTASRFIADPYAPGERMYRTGDVARWLDNGAVEYLGRSDDQLKIRGQRIELGEIDRALSALPDVAQAVAHACVFNQAAATGGDARQLVGYLVSASGLPLDTAALKAQLGEQLPPHMVPVVLIQLPALPLSANGKLDRKALPLPTLSSERSGRPPEPGVETAVAAAFSQLLGCEVNDIDADFFALGGHSLLAMRLAALLSRELERQVTPGQIMVASSVGKLSALLASDLSDEQAQRLGFDAILPLRESDGPTLFCFHPASGFAWQFSVLARYLSPRWSIVGIQSPRPQGPMATAADLDAVCEHHLQTLLSQQPRGPYYLFGYSLGGTLAQGIAARLRQRGEAVAFLGLLDTWPPETQNWAEKEANGLDXEVLAEIAREREAFLAAQQGQASGELFSVIEGNYADAVRLLTTAHSAKFDGKATLFVAEKTRQPGMDPQVVWGPWIGELEVFSQDCAHVDIISPQAFEAIGPVVREILG

SEQ ID NO: 6669 - DNA, 1425 bp, Klebsiella oxytoca
  misc_feature (1049)..(1049): n is a, c, g or t
atgcaagatagcgccaaccagcccggatttttgtttcacgattacgagaccttcggcaccagcccttcgctcgaccggccgtcgcagtttgccgccatccgtaccgatgaagacctgaatgtcgtcggcgaacctgaagtgttctactgcaggctcgccgacgactatctgccgcagccgcaggcggtaatggtcaccgggataacgccgcaggaggccaatgccaaaggcgacaacgaagccgcgtttgcccgccgcgttcacgatctgttcacggtgccgaaaacctgcatcgtcggctacaacaacgtgcgcttcgatgatgaagtcacgcgcaatatcttctatcgcaatttttacgatccttacgcctggagctggcagcatgacaactcccgctgggatctactggacgtgatgcgcgcctgctatgcgctgcgccccgaggggatcaactggccggaaaatgatgagggcttaccgagcttccggctggagcatctgaccgtcgctaacggcatcgaacacagcaacgcccacgacgcgatggccgacgtttacgccactatcgcgatggcaaagctggtgaagactcagcagccgcgcctgttcgactatctttacgcccaccgcaacaagcgcaagctggcgacgctgattgacgtgccgcagatcaagccgctggtgcatgtttccggtatgttcggcgcggcgcgcggcaacaccagcctggtcgccccgctggcgtggcacccggataaccgtaacgcggtgattatggtcgacctggccggtgatatcgcccctctgctggatctggatgccgatgccctgcgcgaacggctgtatacgccgaaaagcgagttgggcgatctggctgcggtgccgatcaagctggtccacctcaataagtgcccggtgctggcgcagcaaaataccctgcgcccgcaggatgctgaccggctgggcatcaatatccagcgctgtctggagaacgcccagcggctgcgggctaatccacaggtgcgcgagaaagcggtggcgatttntgccgaagcggagccgtttgtgccgtccgataacgtcgatacgcagctgtataacggctttttcagcgatgccgaccgcgcggcgatgaaaatcgtactcgagacggagccgcgcaatctgccggcgctggacattacctttgctgataagcgtattgagcgtctactgttcaactatcgcgcgcgcaattacccgggcacgctggatgaagccgagcagcagcgctggttggagcaccgtcgccaggtgtttacgccagagtttttgcaggcctacgccgatgagctacagatgctgtatcagcaatatgcggatgataaagagaagctggcgcagctgaaggcgctgtggcagtacgcgcaggatattgtttga

SEQ ID NO: 6670 - protein, 474 aa, Klebsiella oxytoca
  misc_feature (350)..(350): Xaa can be any naturally occurring amino acid
MQDSANQPGFLFHDYETFGTSPSLDRPSQFAAIRTDEDLNVVGEPEVFYCRLADDYLPQPQAVMVTGITPQEANAKGDNEAAFARRVHDLFTVPKTCIVGYNNVRFDDEVTRNIFYRNFYDPYAWSWQHDNSRWDLLDVMRACYALRPEGINWPENDEGLPSFRLEHLTVANGIEHSNAHDAMADVYATIAMAKLVKTQQPRLFDYLYAHRNKRKLATLIDVPQIKPLVHVSGMFGAARGNTSLVAPLAWHPDNRNAVIMVDLAGDIAPLLDLDADALRERLYTPKSELGDLAAVPIKLVHLNKCPVLAQQNTLRPQDADRLGINIQRCLENAQRLRANPQVREKAVAIXAEAEPFVPSDNVDTQLYNGFFSDADRAAMKIVLETEPRNLPALDITFADKRIERLLFNYRARNYPGTLDEAEQQRWLEHRRQVFTPEFLQAYADELQMLYQQYADDKEKLAQLKALWQYAQDIV

SEQ ID NO: 6671 - DNA, 1044 bp, Klebsiella oxytoca
  misc_feature (52)..(52): n is a, c, g or t
atgctaaagcaaacaacggagctggcgccggacggccagccatggaatcttnttaccctgcgtaacgacgcaggcatgacggccaccgtgatggactggggcgcgacgctgctctccgcgcgcgtgcccctggcggacggtagcgaacgagaagcgctgctcggctgcgcaacccccggcgactatacgcgccaggccgcttaccttggcgcttccgtaggccgttacgctaaccgtattgccaacagccgctttaccctggatggccagctcatcaatctgacgccctccaacgaggctggccatcagctccacggcggaccggaaggttttgataagcgccgctggcaaattgttagcgctgacgctcgccacgcgctgttttctctctcctcccgcgatggcgatcagggctatcctggtaatctgacggcaaccgcgcactaccgcctgaccgacgataaccggatcgctattgagtatcgcgccaccgtggaccagccgtgcccggtgaatctgacaaaccacgtctatttcaacctcgatggcgtgcagagcgacgtgcgcaaccataagctgcaaatttttgccgatgtttatctgcccgtcgaaagcgacggtattccggggggagatctgcaaaacgtcaccctgaccagcttcgatttccgcacgccgaaaaccctggcggacgacttcctgcgcgacgaagatcagcaaaaagtaaaaggttatgaccatgccttcctgctacaggcgctggggaatgccgatactccggccgctcacgtctggtcgcaggacgaaaagctacagatgacggtttatacttccgcccccgcgttgcagttttactccggcaactatcttggcggcacgccgtcgcgcacagcgcaggcgtacgatgactggcagggcctggctctggagagcgagttccttccagattctccgaatcatccggaatggccgcagccggattgtgtactgcgccccggcgaagagtacgtcagcctgacggaatatcagtttatcgctcgatag

SEQ ID NO: 6672 - protein, 347 aa, Klebsiella oxytoca
  misc_feature (18)..(18): Xaa can be any naturally occurring amino acid
MLKQTTELAPDGQPWNLXTLRNDAGMTATVMDWGATLLSARVPLADGSEREALLGCATPGDYTRQAAYLGASVGRYANRIANSRFTLDGQLINLTPSNEAGHQLHGGPEGFDKRRWQIVSADARHALFSLSSRDGDQGYPGNLTATAHYRLTDDNRIAIEYRATVDQPCPVNLTNHVYFNLDGVQSDVRNHKLQIFADVYLPVESDGIPGGDLQNVTLTSFDFRTPKTLADDFLRDEDQQKVKGYDHAFLLQALGNADTPAAHVWSQDEKLQMTVYTSAPALQFYSGNYLGGTPSRTAQAYDDWQGLALESEFLPDSPNHPEWPQPDCVLRPGEEYVSLTEYQFIAR

SEQ ID NO: 6673 - DNA, 1044 bp, Klebsiella oxytoca
  misc_feature (172)..(172): n is a, c, g or t
atgctaaagcaaacaacggagctggcgccggacggccagccatggaatcttcttaccctgcgtaacgacgcaggcatgacggccaccgtgatggactggggcgcgacgctgctctccgcgcgcgtgcccctggcggacggtagcgaacgagaagcgctgctcggctgcgcancccccggcgactatacgcgccaggccgcttaccttggcgcttccgtaggccgttacgctaaccgtattgccaacagccgctttaccctggatggccagctcatcaatctgacgccctccaacgaggctggccatcagctccacggcggaccggaaggttttgataagcgccgctggcaaattgttagcgctgacgctcgccacgcgctgttttctctctcctcccgcgatggcgatcagggctatcctggtaatctgacggcaaccgcgcactaccgcctgaccgacgataaccggatcgctattgagtatcgcgccaccgtggaccagccgtgcccggtgaatctgacaaaccacgtctatttcaacctcgatggcgtgcagagcgacgtgcgcaaccataagctgcaaatttttgccgatgtttatctgcccgtcgaaagcgacggtattccggggggagatctgcaaaacgtcaccctgaccagcttcgatttccgcacgccgaaaaccctggcggacgacttcctgcgcgacgaagatcagcaaaaagtaaaaggttatgaccatgccttcctgctacaggcgctggggaatgccgatactccggccgctcacgtctggtcgcaggacgaaaagctacagatgacggtttatacttccgcccccgcgttgcagttttactccggcaactatcttggcggcacgccgtcgcgcacagcgcaggcgtacgatgactggcagggcctggctctggagagcgagttccttccagattctccgaatcatccggaatggccgcagccggattgtgtactgcgccccggcgaagagtacgtcagcctgacggaatatcagtttatcgctcgatag

SEQ ID NO: 6674 - protein, 347 aa, Klebsiella oxytoca
  misc_feature (58)..(58): Xaa can be any naturally occurring amino acid
MLKQTTELAPDGQPWNLLTLRNDAGMTATVMDWGATLLSARVPLADGSEREALLGCAXPGDYTRQAAYLGASVGRYANRIANSRFTLDGQLINLTPSNEAGHQLHGGPEGFDKRRWQIVSADARHALFSLSSRDGDQGYPGNLTATAHYRLTDDNRIAIEYRATVDQPCPVNLTNHVYFNLDGVQSDVRNHKLQIFADVYLPVESDGIPGGDLQNVTLTSFDFRTPKTLADDFLRDEDQQKVKGYDHAFLLQALGNADTPAAHVWSQDEKLQMTVYTSAPALQFYSGNYLGGTPSRTAQAYDDWQGLALESEFLPDSPNHPEWPQPDCVLRPGEEYVSLTEYQFIAR

SEQ ID NO: 6675 - DNA, 1293 bp, Klebsiella oxytoca
  misc_feature (185)..(185): n is a, c, g or t
atgaaagtattagttattggcaacggcggccgcgagcacgccctggcctggaaagcggcgcagtcgccaaaagtcgataccgtttttgtcgccccgggtaacgcgggcaccgccctggaaccagcgctgcagaatgtggctatcggcgtcaccgatattccggcgctgctgagctttgctcaaancgagaaaattgatctgaccatcgttggcccggaagcgccactggtgattggcgttgtggatgcgttccgcgccgcggggctgaaaatcttcggcccaacggaaggcgcggcgcagctggaaggctctaaagccttcaccaaagattttcttgcccgccataacattccgacagcggaataccagaacttcaccgaagtcgagcccgcgctggcatacctgcgtgagaaaggcgcgcccatcgttatcaaggccgacggcctggccgccggcaagggcgtgattgtcgccatgacgctggaagaagcggaagccgccgttcaagacatgctggcaggtaacgcctttggcgacgccgggcaccgcatcgtcattgaagagttcctcgacggcgaagaggcgagctttatcgtgatggtcgacggcgagcacgtcctgccgatggccaccagccaggatcataaacgcgtgggcaatggcgataccggcccgaacacgggcggtatgggcgcttactctccggcaccggtggtcaccgatgaggttcaccagcgcaccatggaacgcattatctggccaaccgtaaaaggtatggcagcggagggtaatacctacaccggtttcctctatgcgggcctgatgatcgacaaacagggcaacccgaaagtaatcgagttcaactgccgctttggcgatccggaaacccagccgatcatgctacgcatgaaatcggatctggtggatctgtgcctcgccgcctgcgacggtaagctgaatgagaaaacctccgagtgggacgagcgcgcctcgctgggcgtcgtgatcgccgccggtggttatccgggcaactacagcaccagcgatgagatccacggcctgccgctggaagaaacggcagacggcaaggtcttccacgccggcaccagactcgctgatgacgatcgcgtgctgaccagcggcggccgggtactctgcgccaccgcgctgggtcgcaccgttgctgaagcgcaaaagcgcgcttacgccctgatgagcgatatcagctgggacggcagctttagccgtaacgacatcggctggcgcgctatcgaacgtgagcaaaaccgctaa

SEQ ID NO: 6676 - protein, 430 aa, Klebsiella oxytoca
  misc_feature (62)..(62): Xaa can be any naturally occurring amino acid
MKVLVIGNGGREHALAWKAAQSPKVDTVFVAPGNAGTALEPALQNVAIGVTDIPALLSFAQXEKIDLTIVGPEAPLVIGVVDAFRAAGLKIFGPTEGAAQLEGSKAFTKDFLARHNIPTAEYQNFTEVEPALAYLREKGAPIVIKADGLAAGKGVIVAMTLEEAEAAVQDMLAGNAFGDAGHRIVIEEFLDGEEASFIVMVDGEHVLPMATSQDHKRVGNGDTGPNTGGMGAYSPAPVVTDEVHQRTMERIIWPTVKGMAAEGNTYTGFLYAGLMIDKQGNPKVIEFNCRFGDPETQPIMLRMKSDLVDLCLAACDGKLNEKTSEWDERASLGVVIAAGGYPGNYSTSDEIHGLPLEETADGKVFHAGTRLADDDRVLTSGGRVLCATALGRTVAEAQKRAYALMSDISWDGSFSRNDIGWRAIEREQNR

SEQ ID NO: 6677 - DNA, 1404 bp, Klebsiella oxytoca
  misc_feature (1282)..(1282): n is a, c, g or t
atgaaattgaacccgttcgctttaactcttgcgccgctgctggccgccggcgcgttttctgctcatgccggcccgcaggcccacgtggtctgcgcttatcaccatacgttgggcgatgacgccattatgatgttcggcaaaccgaatcaggctatgtggcatgatttttttggcaacacccatactgacgcagtgtcgacctatcagacgctgcgcgaccagccggaaaccacctgcgataacaaagccgacagctccgcctactgggcgccatcgctgaagctgcctgacggtcaggtggtcgcgccggcttatcaaaaaacctactaccagaccagcaaagtcgaacagcatccgctgcatccgttcccggccggtctcgaactgctggcgggcgatcatcacggttctgctcccagttcgcgcattacctttctctgcgccaacggcaatggctataccaataaggccgatcagatttgcgggctgcgcaaagcgggggatgcggtacagtttaatatcggtatccagttccccaactgctgggatggcgtcaacctgaaaccgacgcacggccacagtaacgcgacatacgacgtcaatggcgcctgtccaggcgattacccggtgaaaattccgaccgtaaacatgaacgtggcatacgttctgccgcagataaaaacgctggatacggcaaaaattcagctttcaatggatccggtcatggacggcgacaagcgtcaagagcgctggggcagcatctatacggcgcacgcggatttcatgaacggctggacggttgaggcagcgcactatatgaccgagcgctgcatgaataaggggatcgactgcggtagcgcggtgccttatggcttctccacggtagaggagaacgcgctggtggacagcaccgagccgacggtgacccatgccgctccggaaaatctggtggtcagcgataactggaaaaacggcgggcgcacgcataacccggaaaccatgacgctggtgaaattcccgatcccgccgctgccgcagggacaggacgcttcgctgtttaaatatcagttgcggatctacggtggaaaagtggaaaccaacggcgcggatcagatttttctctatccggcgagcaacgactggagcgcaaacagcgtgacctggaatcatcgtccgtcctgcaactacagctctgatggggttctgtatcttaattcaaagcgtgaataccggacgatcgatgttgataaagcggtgcgcaaggcgctggctgagggcaaanccgagatctcgtggtatatcggcggagaccgtcagggcaaccgctatcatttcgatcccgcggggtcgcagcaggagccgatgctgatgctgatgggctttaaaaatacgccggagatctga

SEQ ID NO: 6678 - protein, 467 aa, Klebsiella oxytoca
  misc_feature (428)..(428): Xaa can be any naturally occurring amino acid
MKLNPFALTLAPLLAAGAFSAHAGPQAHVVCAYHHTLGDDAIMMFGKPNQAMWHDFFGNTHTDAVSTYQTLRDQPETTCDNKADSSAYWAPSLKLPDGQVVAPAYQKTYYQTSKVEQHPLHPFPAGLELLAGDHHGSAPSSRITFLCANGNGYTNKADQICGLRKAGDAVQFNIGIQFPNCWDGVNLKPTHGHSNATYDVNGACPGDYPVKIPTVNMNVAYVLPQIKTLDTAKIQLSMDPVMDGDKRQERWGSIYTAHADFMNGWTVEAAHYMTERCMNKGIDCGSAVPYGFSTVEENALVDSTEPTVTHAAPENLVVSDNWKNGGRTHNPETMTLVKFPIPPLPQGQDASLFKYQLRIYGGKVETNGADQIFLYPASNDWSANSVTWNHRPSCNYSSDGVLYLNSKREYRTIDVDKAVRKALAEGKXEISWYIGGDRQGNRYHFDPAGSQQEPMLMLMGFKNTPEI

SEQ ID NO: 6679 - DNA, 1179 bp, Klebsiella aerogenes
  misc_feature (943)..(943): n is a, c, g or t
atgaacgatacccgttttgaaagctgcattaagtgcacggtctgtaccaccacctgcccggtaagtcgggtcaatccgcgctatcccggcccgaaacaagcggggccggacggcgaacgcctgcgtctgaaggatggcgcgctgtacgacgaggcgctgaagtactgcattaactgcaagcgctgcgaggtcgcctgcccgtcggatgtgaaaattggcgatatcattcaacgcgcccgggcacagtacggccagcaaaagccgaccctgcgcgacgccatcctcagccataccgacctgatgggtaccctttccaccccctttgcccccctggtcaacgccgccaccggcttaaaaccggtgcgccgtctgctcgacgcgacgctcaacatcgatcaccggcgtacgctgccgaaatatggtttcggcaccttccgccgcgcttaccgccagctcgccgcccgtcagaagcagtacagcgaacaggtggctttctttcatggctgctacgtcaactataaccatccacagttgggtaaagatctgattcgcgtcgtcaacgcgctgggtaccggggtgcagttgttatcaaaagaaaaatgctgcggcgtaccgctgatcgccaacggttttttcgacaaggcgcgtaagcaggcgcagagcaacgtcgccgcgatgcgggaaaacacgctaccgatcattgccacctcctcgacctgcgcctttacgctacgtgatgaatacccccatctcctcgatgtcgataacagcgatcttcgcgatcgcgtcgagcttgccacccgctggatctggaaacagctggctgccggcaggacgctaccgctgcgcccgctgccgctgaaggtggtctatcacaccccgtgtcatatggaaaagatgggctggtcgctgtataccctcgagctgctgcggctgatccccngcctgcagctggaggtgctggattcacagtgctgcggcatcgcaggcacctacgggtttaaaactgagaattacgcggtatcccaggctatcggcgccccgctgttccgtcagattgaggagagcggggccgacctcgtcgtcaccgactgcgagacctgcaaatggcagattgagatgtccaccagcaaacgctgcgagcatccgctgacggtgctggcgcaggcgctcgtctga

SEQ ID NO: 6680 - protein, 392 aa, Klebsiella aerogenes
  misc_feature (315)..(315): Xaa can be any naturally occurring amino acid
MNDTRFESCIKCTVCTTTCPVSRVNPRYPGPKQAGPDGERLRLKDGALYDEALKYCINCKRCEVACPSDVKIGDIIQRARAQYGQQKPTLRDAILSHTDLMGTLSTPFAPLVNAATGLKPVRRLLDATLNIDHRRTLPKYGFGTFRRAYRQLAARQKQYSEQVAFFHGCYVNYNHPQLGKDLIRVVNALGTGVQLLSKEKCCGVPLIANGFFDKARKQAQSNVAAMRENTLPIIATSSTCAFTLRDEYPHLLDVDNSDLRDRVELATRWIWKQLAAGRTLPLRPLPLKVVYHTPCHMEKMGWSLYTLELLRLIPXLQLEVLDSQCCGIAGTYGFKTENYAVSQAIGAPLFRQIEESGADLVVTDCETCKWQIEMSTSKRCEHPLTVLAQALV

SEQ ID NO: 6681 - DNA, 1071 bp, Klebsiella pneumoniae
  misc_feature (263)..(263): n is a, c, g or t
atgaaaatgaaacttaccgcgctgatgagcggaatgattctgtccagttcggcgctgtgcttcagtgcgacagcggctgataaaatggtcatcgcccaccgcggcgccagcgggtatctgccggaacataccctgccggcgaaagcgatggcttacgctcagggggcggattaccttgagcaagacctggtgatgaccaaagacgaccggctggtggtgttacacgaccactatctcgatcgggtgactgacgttgcgcagcntttcccgcagcgagcgcgtcaagatggccgtttctacgccatcgactttaccctggccgagattaaatcgctgaagtttaccgaaggttttgagccgaaaaatggtaagaacgtgcaaacctatcccggtcgattcccgatgggcaaatccgatttcagtattcatacctttgaagaggagattgagtttgtccaggggctgaaccattccaccggcaaaaacatcggtatctacccggaaatcaaagcgccgtggttccaccaccaggaaggcaaagatattgccgccagcacattgaaggtgctgaaggaatatggctataccagcaagcaggataaggtttatctgcagtgctttgacgccaacgagctcaaacgcattaaaaatgagctggagccgaagatggggatggatctcaatctggtgcagctcatcgcctataccgactggaatgaaacccagcagaaacaggccgatggtaagtgggtgaactacagctatgactggatgttcaagccaggggcgatggcgcagattgcgcagtacgcggacggcatcggcccggattaccatatgctggtagcggaaggctcgaagccgggggcggtgaagctgacggcgatggtgaaagaggcgcacgccagccatctgcaggtgcatccgtacaccgtgcgcgcggatcagttgccggagtacgcgactaacgttaatcagctctatgacgtgctgtataaccaggcgggcgtcgacggcttatttaccgatttcccggataaagcggtgcagttcctggacgcgaaacactaa

SEQ ID NO: 6682 - protein, 356 aa, Klebsiella pneumoniae
  misc_feature (88)..(88): Xaa can be any naturally occurring amino acid
MKMKLTALMSGMILSSSALCFSATAADKMVIAHRGASGYLPEHTLPAKAMAYAQGADYLEQDLVMTKDDRLVVLHDHYLDRVTDVAQXFPQRARQDGRFYAIDFTLAEIKSLKFTEGFEPKNGKNVQTYPGRFPMGKSDFSIHTFEEEIEFVQGLNHSTGKNIGIYPEIKAPWFHHQEGKDIAASTLKVLKEYGYTSKQDKVYLQCFDANELKRIKNELEPKMGMDLNLVQLIAYTDWNETQQKQADGKWVNYSYDWMFKPGAMAQIAQYADGIGPDYHMLVAEGSKPGAVKLTAMVKEAHASHLQVHPYTVRADQLPEYATNVNQLYDVLYNQAGVDGLFTDFPDKAVQFLDAKH

SEQ ID NO: 6683 - DNA, 2634 bp, Klebsiella pneumoniae
  misc_feature (259)..(259): n is a, c, g or t
atgagcgaccttgcgagagaaattacaccggtcaacattgaggaagagcttaagaactcttatctggattatgcgatgtcggtcattgttggccgtgcgctgccggatgtccgagatggcctgaagccggtacaccgtcgcgtactttacgccatgaacgtattgggcaatgactggaacaaagcctataaaaaatcagcccgtgtcgttggtgacgtaatcggtaaataccacccgcacggcgacatcgcggtatacnacaccatcgtgcgtatggcgcagccgttctcgctgcgttacatgctggtggacggccagggtaactttggttccatcgacggcgactccgccgcggcgatgcgttataccgaaattcgtctggcgaaaatcgctcatgagctgatggccgatcttgaaaaagagacggtcgatttcgtcgacaactatgacggtacggagcgtattccggacgtcatgccgaccaaaattcctaacctgctggtgaacggcgcctccgggatcgccgtagggatggccaccaacataccgccgcataacctgacggaagtgattaacggctgtctggcgtatgttgacgatgaagacatcagcattgaagggctgatggcgcatattcctggccctgatttcccgaccgccgccattatcaatggccgtcgcggcatcgaagaggcctatcgcaccggtcgcggtaaagtgtacatccgcgcgcgcgcggaagtggaagtggacgcgaaatccggccgcgaaaccatcatcgtgcacgaaattccgtatcaggtgaacaaagcgcgcctgatcgagaaaatcgccgagctggtcaaagaaaaacgcgtggaaggcatcagcgcgctgcgtgacgagtctgataaagacgggatgcgcatcgtgattgaagtgaagcgcgatgcggtaggggaagtggtgcttaacaacctctattcccagacccagctgcaggtctccttcggcatcaacatggtagctctgcaccatggtcagccgaagatcatgaacctgaaggacatcatcgccgcgtttgtacgccaccgccgtgaagtggtgacccgtcgtacgattttcgaactgcgcaaagcgcgcgaccgggcgcatatcctcgaagcgctggccgttgcgctggccaacatcgacccgattatcgaactgatccgtcgcgcgccgaccccggcagaagcgaaaacggcgctggttgcccaggcgtgggatctcggtaacgtcgcggcgatgctggagcgcgccggggatgacgccgcgcgtccggaatggctggagccagagttcggcgtgcgcgacggtaaatactatctgaccgagcagcaggctcaggcgattctggatctgcgtctgcagaaactgaccggccttgagcatgaaaaactgctcgacgaatataaagagctgctggagcagatcgcggagctgctgcacattctcggcagcgccgaccgtctgatggaagtgattcgcgaagagctggagctgatccgcgatcagttcggcgacgaacgtcgtaccgaaatcaccgccaacagcgctgatattaacatcgaagatctgatcaaccaggaagatgtggtggtcaccctgtcgcatcaggggtatgtgaagtatcagccgctgaccgactacgaagcacagcgtcgtggcggtaaaggcaaatcggcagcgcgcattaaagaagaagactttatcgaccgcctgctggtggctaacacccatgacaccatcctctgcttctcaagccgcggccgtctgtactggatgaaggtctatcagctgccggaagccagccgcggcgcgcgcggtcggccgatcgtcaacctgctgccgctggaagccgatgagcgcatcaccgccatcctgccggtccgcgagtacgaagagggcgtcaacgtctttatggcgaccgccagcggtaccgtgaagaaaaccgcgctgaccgagttcagccgtccgcgttccgccggtatcatcgcggtcaacctgaacgaaggcgatgagctgatcggcgtcgatctgacctctggtcaggatgaagtgatgctgttctccgcggccggtaaggttgtacgcttcaaggaagacgccgttcgcgccatgggccgtaccgccaccggcgtacgcggtattaagcttgcggaaaacgacagcgtcgtctcgctgattattccacgcggcgaaggcgcgatcctgacggtgacgcaaaacggttacggtaaacgtaccgcggcggcggagtatccgaccaagtcgcgtgccacccagggcgttatttcgatcaaagtcaccgagcgtaacggttccgtggtcggcgccgtgcaggtggatgactgcgatcagatcatgatgatcaccgacgccgggacgctggtgcgtacccgcgtttccgaagtgagcatcgtgggccgtaacacccagggcgtgatcctcatccgcaccgcggaagatgaaaacgtggtgggtctgcagcgcgtggctgagccggtggatgatgaagagctggatgccatcgatggtagcgcggcggaaggcgatgacgatatcgccccggaagcggataccgatgacgacatcgccgaagacgaagaataa

SEQ ID NO: 6684 - protein, 877 aa, Klebsiella pneumoniae
  misc_feature (87)..(87): Xaa can be any naturally occurring amino acid
MSDLAREITPVNIEEELKNSYLDYAMSVIVGRALPDVRDGLKPVHRRVLYAMNVLGNDWNKAYKKSARVVGDVIGKYHPHGDIAVYXTIVRMAQPFSLRYMLVDGQGNFGSIDGDSAAAMRYTEIRLAKIAHELMADLEKETVDFVDNYDGTERIPDVMPTKIPNLLVNGASGIAVGMATNIPPHNLTEVINGCLAYVDDEDISIEGLMAHIPGPDFPTAAIINGRRGIEEAYRTGRGKVYIRARAEVEVDAKSGRETIIVHEIPYQVNKARLIEKIAELVKEKRVEGISALRDESDKDGMRIVIEVKRDAVGEVVLNNLYSQTQLQVSFGINMVALHHGQPKIMNLKDIIAAFVRHRREVVTRRTIFELRKARDRAHILEALAVALANIDPIIELIRRAPTPAEAKTALVAQAWDLGNVAAMLERAGDDAARPEWLEPEFGVRDGKYYLTEQQAQAILDLRLQKLTGLEHEKLLDEYKELLEQIAELLHILGSADRLMEVIREELELIRDQFGDERRTEITANSADINIEDLINQEDVVVTLSHQGYVKYQPLTDYEAQRRGGKGKSAARIKEEDFIDRLLVANTHDTILCFSSRGRLYWMKVYQLPEASRGARGRPIVNLLPLEADERITAILPVREYEEGVNVFMATASGTVKKTALTEFSRPRSAGIIAVNLNEGDELIGVDLTSGQDEVMLFSAAGKVVRFKEDAVRAMGRTATGVRGIKLAENDSVVSLIIPRGEGAILTVTQNGYGKRTAAAEYPTKSRATQGVISIKVTERNGSVVGAVQVDDCDQIMMITDAGTLVRTRVSEVSIVGRNTQGVILIRTAEDENVVGLQRVAEPVDDEELDAIDGSAAEGDDDIAPEADTDDDIAEDEE

SEQ ID NO: 6685 - DNA, 2634 bp, Klebsiella pneumoniae
  misc_feature (247)..(247): n is a, c, g or t
atgagcgaccttgcgagagaaattacaccggtcaacattgaggaagagcttaagaactcttatctggattatgcgatgtcggtcattgttggccgtgcgctgccggatgtccgagatggcctgaagccggtacaccgtcgcgtactttacgccatgaacgtattgggcaatgactggaacaaagcctataaaaaatcagcccgtgtcgttggtgacgtaatcggtaaataccacccgcacggcgacntcgcggtatacgacaccatcgtgcgtatggcgcagccgttctcgctgcgttacatgctggtggacggccagggtaactttggttccatcgacggcgactccgccgcggcgatgcgttataccgaaattcgtctggcgaaaatcgctcatgagctgatggccgatcttgaaaaagagacggtcgatttcgtcgacaactatgacggtacggagcgtattccggacgtcatgccgaccaaaattcctaacctgctggtgaacggcgcctccgggatcgccgtagggatggccaccaacataccgccgcataacctgacggaagtgattaacggctgtctggcgtatgttgacgatgaagacatcagcattgaagggctgatggcgcatattcctggccctgatttcccgaccgccgccattatcaatggccgtcgcggcatcgaagaggcctatcgcaccggtcgcggtaaagtgtacatccgcgcgcgcgcggaagtggaagtggacgcgaaatccggccgcgaaaccatcatcgtgcacgaaattccgtatcaggtgaacaaagcgcgcctgatcgagaaaatcgccgagctggtcaaagaaaaacgcgtggaaggcatcagcgcgctgcgtgacgagtctgataaagacgggatgcgcatcgtgattgaagtgaagcgcgatgcggtaggggaagtggtgcttaacaacctctattcccagacccagctgcaggtctccttcggcatcaacatggtagctctgcaccatggtcagccgaagatcatgaacctgaaggacatcatcgccgcgtttgtacgccaccgccgtgaagtggtgacccgtcgtacgattttcgaactgcgcaaagcgcgcgaccgggcgcatatcctcgaagcgctggccgttgcgctggccaacatcgacccgattatcgaactgatccgtcgcgcgccgaccccggcagaagcgaaaacggcgctggttgcccaggcgtgggatctcggtaacgtcgcggcgatgctggagcgcgccggggatgacgccgcgcgtccggaatggctggagccagagttcggcgtgcgcgacggtaaatactatctgaccgagcagcaggctcaggcgattctggatctgcgtctgcagaaactgaccggccttgagcatgaaaaactgctcgacgaatataaagagctgctggagcagatcgcggagctgctgcacattctcggcagcgccgaccgtctgatggaagtgattcgcgaagagctggagctgatccgcgatcagttcggcgacgaacgtcgtaccgaaatcaccgccaacagcgctgatattaacatcgaagatctgatcaaccaggaagatgtggtggtcaccctgtcgcatcaggggtatgtgaagtatcagccgctgaccgactacgaagcacagcgtcgtggcggtaaaggcaaatcggcagcgcgcattaaagaagaagactttatcgaccgcctgctggtggctaacacccatgacaccatcctctgcttctcaagccgcggccgtctgtactggatgaaggtctatcagctgccggaagccagccgcggcgcgcgcggtcggccgatcgtcaacctgctgccgctggaagccgatgagcgcatcaccgccatcctgccggtccgcgagtacgaagagggcgtcaacgtctttatggcgaccgccagcggtaccgtgaagaaaaccgcgctgaccgagttcagccgtccgcgttccgccggtatcatcgcggtcaacctgaacgaaggcgatgagctgatcggcgtcgatctgacctctggtcaggatgaagtgatgctgttctccgcggccggtaaggttgtacgcttcaaggaagacgccgttcgcgccatgggccgtaccgccaccggcgtacgcggtattaagcttgcggaaaacgacagcgtcgtctcgctgattattccacgcggcgaaggcgcgatcctgacggtgacgcaaaacggttacggtaaacgtaccgcggcggcggagtatccgaccaagtcgcgtgccacccagggcgttatttcgatcaaagtcaccgagcgtaacggttccgtggtcggcgccgtgcaggtggatgactgcgatcagatcatgatgatcaccgacgccgggacgctggtgcgtacccgcgtttccgaagtgagcatcgtgggccgtaacacccagggcgtgatcctcatccgcaccgcggaagatgaaaacgtggtgggtctgcagcgcgtggctgagccggtggatgatgaagagctggatgccatcgatggtagcgcggcggaaggcgatgacgatatcgccccggaagcggataccgatgacgacatcgccgaagacgaagaataa

SEQ ID NO: 6686 - protein, 877 aa, Klebsiella pneumoniae
  misc_feature (83)..(83): Xaa can be any naturally occurring amino acid
MSDLAREITPVNIEEELKNSYLDYAMSVIVGRALPDVRDGLKPVHRRVLYAMNVLGNDWNKAYKKSARVVGDVIGKYHPHGDXAVYDTIVRMAQPFSLRYMLVDGQGNFGSIDGDSAAAMRYTEIRLAKIAHELMADLEKETVDFVDNYDGTERIPDVMPTKIPNLLVNGASGIAVGMATNIPPHNLTEVINGCLAYVDDEDISIEGLMAHIPGPDFPTAAIINGRRGIEEAYRTGRGKVYIRARAEVEVDAKSGRETIIVHEIPYQVNKARLIEKIAELVKEKRVEGISALRDESDKDGMRIVIEVKRDAVGEVVLNNLYSQTQLQVSFGINMVALHHGQPKIMNLKDIIAAFVRHRREVVTRRTIFELRKARDRAHILEALAVALANIDPIIELIRRAPTPAEAKTALVAQAWDLGNVAAMLERAGDDAARPEWLEPEFGVRDGKYYLTEQQAQAILDLRLQKLTGLEHEKLLDEYKELLEQIAELLHILGSADRLMEVIREELELIRDQFGDERRTEITANSADINIEDLINQEDVVVTLSHQGYVKYQPLTDYEAQRRGGKGKSAARIKEEDFIDRLLVANTHDTILCFSSRGRLYWMKVYQLPEASRGARGRPIVNLLPLEADERITAILPVREYEEGVNVFMATASGTVKKTALTEFSRPRSAGIIAVNLNEGDELIGVDLTSGQDEVMLFSAAGKVVRFKEDAVRAMGRTATGVRGIKLAENDSVVSLIIPRGEGAILTVTQNGYGKRTAAAEYPTKSRATQGVISIKVTERNGSVVGAVQVDDCDQIMMITDAGTLVRTRVSEVSIVGRNTQGVILIRTAEDENVVGLQRVAEPVDDEELDAIDGSAAEGDDDIAPEADTDDDIAEDEE

SEQ ID NO: 6687 - DNA, 2259 bp, Klebsiella pneumoniae
  misc_feature (239)..(239): n is a, c, g or t
atgagcgatatggcagagcgccttgcgctgcatgaatttacggaaaatgcttacctgaactactccatgtacgtgatcatggacagggcattaccgtttattggcgatggcttaaaaccggtccagcgtcgcatcgtctatgcgatgtccgagctggggctgaacgccagcgcgaaattcaaaaagtccgcccgcaccgtcggcgacgtgttgggtaaatatcacccgcacggcgacancgcctgctatgaagcgatggtgctgatggcgcagccgttctcttaccgctatccgctggtggatggtcagggaaactggggggcgccggacgatcccaaatctttcgccgccatgcgttacaccgaatcccgcctgtcgaagtatgccgagctgctgctcagcgagctggggcaggggacggtcgactgggtgccaaactttgacggcacgctgcaggagccgaaaatgctgccagcgcgtctgccgaacatcctgctgaacggcaccaccggcatcgcggtaggcatggcgaccgatattcctccgcacaacctgcgggaagtggccaaagcggcgattacgctgattgagcagccgaaaaccaccctcgacgaactgctggatatcgtacaggggccggatttcccgaccgaggcggagatcatcacctcgcgggcggaaattcgcaaaatctaccagaacgggcgcggctcagtgcgcatgcgtgcggtgtggagtaaagaggacggcgcggtggtgatcagtgcgctgccgcatcaggtctccggcgccaaagtgctggagcagattgcggcgcagatgcgcaataaaaagctgccgatggttgacgatctgcgcgacgaatcggaccacgaaaacccgacccgtctggtgattgtcccgcgctccaaccgggtggatatggaacaggtgatgaaccacctgttcgccaccaccgatctggagaagagctaccgcatcaacctcaatatgatcggccttgacggccgcccggcggtgaaaaacctgctggagatcctcagcgagtggctggtgttccgtcgcgataccgtgcgtcgccgtctaaaccatcggttagagaaagtgctgaagcgcctgcatatcctcgaaggtttgctggtggcgtttcttaatatcgatgaagtgattgagatcatccgcactgaagatgaaccgaagccggccctgatgtcgcgctttggcatcagcgaaacccaggcggaagcgattctggaattaaaactgcgccacctcgccaaactggaagagatgaagatccgcggcgagcagagcgagctggaaaaagagcgcgaccagctgcaggcgattctggcgtctgaacgtaagatgaacaacctgctgaaaaaagagctgcaggccgatgccgatgccttcggcgacgaccgtcgctcgccgcttcacgagcgtgaagaagcgaaagcgatgagcgagcatgacatgctgccgtctgagccggtgactatcgttctgtcgcagatgggctgggtgcgcagcgccaaaggacacgacattgacgcccagggcttgagctataaggcgggcgacagctggaaagcctcggcgaagggcaagagcaaccagccggtggtgtttatcgataccaccggacgcagctatgccatcgatccgattactctgccttccgcgcgtggccagggtgaaccgcttaccggcaaactgaccctgccgccgggcgcgaccgtggagcatatgctaatggaaagcgacgatcagaaactgctgatggcttccgacgcgggctacggtttcgtctgtaccttcaacgatctggtggcgcgcaaccgtgccggtaaagcgctaatcaccctgcctgacaacgcgcacgtgatgccgccgctggtgattgaggatgagtccgatatgctgctggccatcaccgccgccgggcggatgctgatgttcccggtcagcgatctgccgcagctgtcgaaaggcaagggcaacaaaattatcagcattccggcggcggaagccgcagccggccaggacggtctggcacatctgtttgttctgccgccgcagagtacgctgaccattcacgtcggcaaacggaagatcaaactgcgtccggaagagctgcaaaaagtcaccggcgagcgcggccgccgcggttcgctgatgcgcgggctgcagaaaattgaccgcgtggaaattgactcgccgcgtcgtgccgcggcaggcgatagcgaagagtaa

SEQ ID NO: 6688 - protein, 752 aa, Klebsiella pneumoniae
  misc_feature (80)..(80): Xaa can be any naturally occurring amino acid
MSDMAERLALHEFTENAYLNYSMYVIMDRALPFIGDGLKPVQRRIVYAMSELGLNASAKFKKSARTVGDVLGKYHPHGDXACYEAMVLMAQPFSYRYPLVDGQGNWGAPDDPKSFAAMRYTESRLSKYAELLLSELGQGTVDWVPNFDGTLQEPKMLPARLPNILLNGTTGIAVGMATDIPPHNLREVAKAAITLIEQPKTTLDELLDIVQGPDFPTEAEIITSRAEIRKIYQNGRGSVRMRAVWSKEDGAVVISALPHQVSGAKVLEQIAAQMRNKKLPMVDDLRDESDHENPTRLVIVPRSNRVDMEQVMNHLFATTDLEKSYRINLNMIGLDGRPAVKNLLEILSEWLVFRRDTVRRRLNHRLEKVLKRLHILEGLLVAFLNIDEVIEIIRTEDEPKPALMSRFGISETQAEAILELKLRHLAKLEEMKIRGEQSELEKERDQLQAILASERKMNNLLKKELQADADAFGDDRRSPLHEREEAKAMSEHDMLPSEPVTIVLSQMGWVRSAKGHDIDAQGLSYKAGDSWKASAKGKSNQPVVFIDTTGRSYAIDPITLPSARGQGEPLTGKLTLPPGATVEHMLMESDDQKLLMASDAGYGFVCTFNDLVARNRAGKALITLPDNAHVMPPLVIEDESDMLLAITAAGRMLMFPVSDLPQLSKGKGNKIISIPAAEAAAGQDGLAHLFVLPPQSTLTIHVGKRKIKLRPEELQKVTGERGRRGSLMRGLQKIDRVEIDSPRRAAAGDSEE

SEQ ID NO: 6689 - DNA, 867 bp, Klebsiella pneumoniae
  misc_feature (343)..(343): n is a, c, g or t
atgtcagagcaaaactaccagccaccaaaagtgtgggaatggaagcaaaacagcggcggcgcgttcgccaacatcaaccgtcccgtttccggcgcgactcatgaacgcgtcctgccggtaggaacccatccgctccagctatactcactcggtacacccaacggccagaaggtgacgatcatgcttgaagagctgctggcgctgggcgtcagcggcgcggagtacgacgcctggctgatacgcattggcgaaggggatcagttttccagcggctttgtcgagatcaacccgaactcgaagatcccggccctcagcgaccattccaccacgccgccgacccggntatttgagtccggcaacattcttctctatctggcggaaaaatttggtttcttcctgccgaaagatcctgccggtcgcaccgaaaccctcaactggctgttctggctgcagggcgcggcgccgttcctcggcggcggcttcggccacttctataactatgcgccagtgaagatcgagtacgcgatcgaccgctttacgatggaagccaaacgccagctcgacgtgctggacaaacagctcgcccgcggtcgctatgtggccggcgaggagtacaccatcgccgatatggctgtctggccgtggtatggcaacgtagtgctgggcaatgtctataacgcggcggagttcctcgacgccgggagctataaaaacgtgctgcgctgggcgcaggatgtcggcaaccgcccggccgtcaagcgcggacgcatcgtcaaccgcaccaacggcccgctcaatgagcagctgcatgagcgccatgatgcccgagactttgacacccaaacggaagataagcgccaggcgtaa

SEQ ID NO: 6690 - protein, 288 aa, Klebsiella pneumoniae
  misc_feature (115)..(115): Xaa can be any naturally occurring amino acid
MSEQNYQPPKVWEWKQNSGGAFANINRPVSGATHERVLPVGTHPLQLYSLGTPNGQKVTIMLEELLALGVSGAEYDAWLIRIGEGDQFSSGFVEINPNSKIPALSDHSTTPPTRXFESGNILLYLAEKFGFFLPKDPAGRTETLNWLFWLQGAAPFLGGGFGHFYNYAPVKIEYAIDRFTMEAKRQLDVLDKQLARGRYVAGEEYTIADMAVWPWYGNVVLGNVYNAAEFLDAGSYKNVLRWAQDVGNRPAVKRGRIVNRTNGPLNEQLHERHDARDFDTQTEDKRQA

SEQ ID NO: 6691 - DNA, 366 bp, Klebsiella oxytoca
  misc_feature (40)..(40): n is a, c, g or t
atgacctatggacaggcgtatttgagcggctggaaagagncctttaactttagcggacgcgccagtcgacggcagttctggacgttttttctcaccaatgtattgatcgccaccgcgccgctggcggcctggtgtctggcaaccagcgttaaccctcaatacggcatcctcagttttgttgtcattccctttgccgcgctctggctgctgttgatggcgatccccctgctggctgtaggctgccggcggatgcatgatatcggccgctccgggatctggtttgtgttgggggttatcattccgtggtttgcaattatttcgctggctctgtgctgcctgcgctcagcgccggcaccgtctcgctga

SEQ ID NO: 6692 - protein, 121 aa, Klebsiella oxytoca
  misc_feature (14)..(14): Xaa can be any naturally occurring amino acid
MTYGQAYLSGWKEXFNFSGRASRRQFWTFFLTNVLIATAPLAAWCLATSVNPQYGILSFVVIPFAALWLLLMAIPLLAVGCRRMHDIGRSGIWFVLGVIIPWFAIISLALCCLRSAPAPSR

SEQ ID NO: 6693 - DNA, 1629 bp, Klebsiella pneumoniae
  misc_feature (1376)..(1376): n is a, c, g or t
atgccgtcaccgatgatttatcaggatctcaccactgccgcgctgctcggccatgcggcgcagtatcacagcgagaccgagattgtctcggtgagtactggcggtgagaaggagcgcagctgctggggggaggtggccagccgtgctcagcggctggcatcggcgctggcgtcgctggggctgccgccgggcgcccgctgcgccacgctggcatggaacaaccgccgccatctggagatctattttgccgtctcctccggcggctgggtgacgcacaccgtcaatccgcggctgtcggttgaccatctgcggtatatcctcaacgacgctgccgatgaagtgctgttttttgaccagacctttttgccgctggtagcgcagctgctgccgcagctgccgacggtgaaacacgtcgtgctgatggagtcccgcagcgaagcggcgctcagccagctgccctcattgctgttttatgacgatctgttgcagcaggggatggcagactatcgctggccgcagctcaatgaactgactccggcttcgctctgttacacctcgggaaccaccggccggccgaaaggggtattgaacacccatcgttcgctggtcctgcacgccctgagcggcaaccagccggacgccgccggcatatcggcgaaggacagcctgttgccggtggtgccgatgttccatgtcaacgcgtgggggacgccgtttatcgccgccatggtcggcgcgcggctggtgctgccggggccgcacctcgatggcgacagcctgctgcagctgctggccgccgagaaggtgacggtggggtttggcgtgccggtgatctgggccggcttgctggcggcgatgcgccggacagaggtccggctgcctgaatttaaacgtgcgctggtcggcggctccgcgctgccgccgtcgatggccgaggcctttcagcgtgattacggcattgcactgacccacgcctggggaatgaccgaaacatcgcccatcggcaccatcaacacaccgttgagcaaacatgacgcgctcccggcacaggagcagcaaaagcagtgcgccggtcaggggcggcccattttcggcatcgaactgcaggtggtggacgtggatggcgaaccgttgccccgggatggtcaaagccaggggtatctgcaggtcagagggcactgggtggtagagcaatactatggtcaggacgcgagcgccctgaccgcggcaggctggtttgataccggtgatatcggtacgctcgacgccaatggttatctggtgatcagcgatcgggcaaaggatattatcaagtccggtggcgagtggatctccaccgttgagctggagaatatcgccatcgcgcatccgggggngcgcagcgcagcggccatcgccgcccgccatccgcgctgggacgagcggccggtgctgctgtgcgtccgtgcggaagggggcgaagtggaggagaccgatctgctgagctggtttgagaagcgggtgcctaaatggcagatcccggaccgggtgatatttgtcgatgcgctgccggtcagcgccacgggtaaggtgctcaaaaatcagctgcgccaggcctacggagagattttaatgagtgagggaaaatga

SEQ ID NO: 6694 - protein, 542 aa, Klebsiella pneumoniae
  misc_feature (459)..(459): Xaa can be any naturally occurring amino acid
MPSPMIYQDLTTAALLGHAAQYHSETEIVSVSTGGEKERSCWGEVASRAQRLASALASLGLPPGARCATLAWNNRRHLEIYFAVSSGGWVTHTVNPRLSVDHLRYILNDAADEVLFFDQTFLPLVAQLLPQLPTVKHVVLMESRSEAALSQLPSLLFYDDLLQQGMADYRWPQLNELTPASLCYTSGTTGRPKGVLNTHRSLVLHALSGNQPDAAGISAKDSLLPVVPMFHVNAWGTPFIAAMVGARLVLPGPHLDGDSLLQLLAAEKVTVGFGVPVIWAGLLAAMRRTEVRLPEFKRALVGGSALPPSMAEAFQRDYGIALTHAWGMTETSPIGTINTPLSKHDALPAQEQQKQCAGQGRPIFGIELQVVDVDGEPLPRDGQSQGYLQVRGHWVVEQYYGQDASALTAAGWFDTGDIGTLDANGYLVISDRAKDIIKSGGEWISTVELENIAIAHPGXRSAAAIAARHPRWDERPVLLCVRAEGGEVEETDLLSWFEKRVPKWQIPDRVIFVDALPVSATGKVLKNQLRQAYGEILMSEGK

SEQ ID NO: 6695 - DNA, 1785 bp, Klebsiella quasipneumoniae
  misc_feature (982)..(982): n is a, c, g or t
gtgagaatcgccaccatcactaactgggcttacgggatcaccgttggcctgacgctggcttccgggagcgctatgctcatggcctccagcgccgaccgcgtcgaacgccaggcggtacagcagcgccaggtctttgataccctctccgacgaggtggaaaacgacgcctgggcgctgtctgacctcgcccggctgtacgtgataaagccttcaccggagacgcttacgcaatatcagcagctgcagcagaccgacaagagcatagagcagcggctgggcggcctgaaagataacggcgccagccgcgaggagctggcgctgctccaggatggcctgcggatcgccgatgagctacaggatgaacagcaggcggccctggcgcatgtcgctcgcggcgatgcgccagcggccatcgcggtgctgtacggcaccgcgtacgagactgaactggagcgcatgcagacgcagatcgatcgcttccgccagatgcttgagcatcgcgccgccgtcgctatcgaccaggccaccgagcgctcgcggatctggcgtacgctgtcggaaatcatggtcggcctgaccgccctgatgtttttgttcgtcctcggcttcattctcaaacgccgggtgctctacccggtggttcgcctgagcgacgtggtccagcgtctcgcctcccaggattatgcggtggagacgccgcactttacccaggtggatgagattggtgacatggctcaggcgatccgcatttttcgcgagaacggcctggcccgtcagcggctggagcagcagcgcgacgccgactgggcgatccgcgagctgctggcgcgtatgactcagcggctgcagggctgtgaaaccattgaggatgtgattaaggtggcggagcggtttgcgccgaatatcgccccgacgatccccggtaaactgtatgttctggataccgacccctggcagatgcgctgcgtagcgcagtggctgncgcccgccggtgagacgacgcccttttctcccgacgactgctgggcgatacggcggggactcagccatccgccggtgcagggcgagcccgatatcacctgctatcatttgccggagacgcacgccggccagtcgctctgcgtaccgctcatcgcccagggcgaagccattggcctgctgactttccagaacgtcaccgccagtgacgctccttcccgggcctatctcgagctgatggcggaagcgttgggcctggcgctggccaatcagcgtttgcgcagcgccctgctggaaaaagcgctgttcgattccctgaccggcctgcgtaaccgccatcatcttgacgaagcgctgcattcgcagatggcgctggcggtccatacccatactccgctgagctgtctgatgatcgacatcgatcattttaaaaccatcaatgatcgctatggccatgaggctggggatctggtgattaagagcgttgcgaccattgtgcagcgcgcggtgcgcgatatcggcatggctttccgctacgggggcgaggagtttttagtgctgctccccgggattgacgaagccggggcgcaccagtgcgccagcgagatctacacccaggtgcgcaatatgacgctgcgcgatggtctgaccgagataggccaggtggatgtgtcgattggcatcgccagctacccgcagcacacccaaagcgatagtctgctgcgcgcggcggatgccgcgctgtaccgggcgaaagagctgggccgctcaaggattgtcagctttggccgcctgaagaccagctaa

SEQ ID NO: 6696 - protein, 594 aa, Klebsiella quasipneumoniae
  misc_feature (328)..(328): Xaa can be any naturally occurring amino acid
MRIATITNWAYGITVGLTLASGSAMLMASSADRVERQAVQQRQVFDTLSDEVENDAWALSDLARLYVIKPSPETLTQYQQLQQTDKSIEQRLGGLKDNGASREELALLQDGLRIADELQDEQQAALAHVARGDAPAAIAVLYGTAYETELERMQTQIDRFRQMLEHRAAVAIDQATERSRIWRTLSEIMVGLTALMFLFVLGFILKRRVLYPVVRLSDVVQRLASQDYAVETPHFTQVDEIGDMAQAIRIFRENGLARQRLEQQRDADWAIRELLARMTQRLQGCETIEDVIKVAERFAPNIAPTIPGKLYVLDTDPWQMRCVAQWLXPAGETTPFSPDDCWAIRRGLSHPPVQGEPDITCYHLPETHAGQSLCVPLIAQGEAIGLLTFQNVTASDAPSRAYLELMAEALGLALANQRLRSALLEKALFDSLTGLRNRHHLDEALHSQMALAVHTHTPLSCLMIDIDHFKTINDRYGHEAGDLVIKSVATIVQRAVRDIGMAFRYGGEEFLVLLPGIDEAGAHQCASEIYTQVRNMTLRDGLTEIGQVDVSIGIASYPQHTQSDSLLRAADAALYRAKELGRSRIVSFGRLKTS

SEQ ID NO: 6697 - DNA, 2412 bp, Klebsiella pneumoniae
  misc_feature (1561)..(1561): n is a, c, g or t
atgaccaaccactgggtggatatcaaaaacgccaacgtcgtggtggtgatgggcggtaacgccgccgaagcccatccggtgggtttccgctgggcgatggaggcgaaaaacaataacgacgccacgctgatcgtcgtcgacccgcgctttacgcgtaccgcgtcggtggccgatatctatgcgccgattcgttccggtaccgacattaccttcctgtcgggcgtgctgctgtacctgatcgaaaacaataagatcaatgccgagtacgttaagcattacaccaatgccagcctgctggtgcgggatgattttgccttcgaagaggggctgttcagcggctacgatgcggaaaaacgccagtacgataaatcgtcctggaactaccagttcgatgaaaacggctacgccaaacgcgatgaaacgctcacccacccgcgctgcgtgtggaatctgctgaagcagcacgtttcccgttacacgcccgaggtggtcgaaaacatctgcggtacgccgaaagcggacttccttaaagtgtgcgacgtgctggcctcaaccagcgccgcggaccgcaccaccaccttcctgtatgccctgggctggacgcagcacaccgtcggcgcgcagaacatccgtaccatggcgatgatccagctgctgctcggcaatatggggatggccggcggcggcgtcaacgccctgcgcggccactcaaatattcaggggctgaccgatttgggcctgctgtcgaccagtctgccgggctatttgacgctgccatcggacaaacagaccgatttgcaaagctacctcagcgccaacacgccgaaggcgaccctgcccgagcaggtgaactactggagcaactacccgaaattcttcgttagcctgatgaaatccttctacggcgaggcggcgcaaaaagagaacgactggggctttgagtggttaccgaagtgggaccaggcttacgacgttatcaaatacttcaatatgatggataacggcaacgtcaccggctatatctgccaggggtttaacccggttgcctccttcccggacaaaaacaaagtggttcgcagcctcagcaagctgaaatatatggtggttatcgacccgctggtgaccgaaacctcgaccttctggcagaaccacggcgagtctaatgatgtcgacccgtcggcgattcagaccgaagtcttccgtctgccgtcgacctgctttgccgaagaggacggttcgatcgccaactccggccgctggctgcagtggcactggaaaggtcaggatgccccaggtgaagcgcgcaatgatggcgaaatccttgccgggatttaccatcgcctgcgcgaactgtaccgcaccgaaggcgggaagggcgcggaacccctgctgaagatgagctggcgctacaagcagccggaccatccggaatcggaagaggtggcaaaagagaacaacggctacgcgctggcggatctctacgatcaaaatggcactttgctggcgaaaaaaggccaactgctcaatagcttcgcgctgctgcgcgatgacggcagcaccncgtcgtcttgctggatctataccggcagctggaccgagcagggtaaccagatggcgaatcgtgataacgccgatccttcgggcctgggcaatacgctgggatgggcctgggcgtggccgctcaatcgtcgggtgctgtacaaccgcgcttcggccgatatcaacggcaagccctgggatgcgaagcggatgctgatccagtggaacggcaacaagtgggtcgggaatgatattccggacttcaataccgcgccgccagggagcaacaccgggccgtttatcatgcagcaggaggggctgggtcgcctgtttgcgctcgataaactggcggaagggccgttcccggagcactacgagccgatggaaaccccgcttggcactaacccgctgcacccgaaggtggtctccagcccggtggtgcggttgtatgaagaggacgccattcgcttaggtaagaaggataaattcccgtatgtcgggaccacctatcgtctgaccgagcatttccacacctggaccaagcatgcgttgctcaattccatcgcgcagccggaacagtttgtcgaaatcagcgaagggctggcgaaaagcaaaggtatcgctaacggcgattgggtgaaagtcagcagcaagcgcggcttcattcgcgcggttgccgtggtgacccgccgactgcgcacgctgaacgtcaacggccagcaggtggagaccgtcgggatcccgctgcactggggttttgaaggcgtggcccgcaaaggctacatcgccaacaccctgacgcctaacgttggcgattccaactcgcaaacgccggagtacaaggcgttcctggtcaacatcgagaaagcgtaa

SEQ ID NO: 6698 - protein, 803 aa, Klebsiella pneumoniae
  misc_feature (521)..(521): Xaa can be any naturally occurring amino acid
MTNHWVDIKNANVVVVMGGNAAEAHPVGFRWAMEAKNNNDATLIVVDPRFTRTASVADIYAPIRSGTDITFLSGVLLYLIENNKINAEYVKHYTNASLLVRDDFAFEEGLFSGYDAEKRQYDKSSWNYQFDENGYAKRDETLTHPRCVWNLLKQHVSRYTPEVVENICGTPKADFLKVCDVLASTSAADRTTTFLYALGWTQHTVGAQNIRTMAMIQLLLGNMGMAGGGVNALRGHSNIQGLTDLGLLSTSLPGYLTLPSDKQTDLQSYLSANTPKATLPEQVNYWSNYPKFFVSLMKSFYGEAAQKENDWGFEWLPKWDQAYDVIKYFNMMDNGNVTGYICQGFNPVASFPDKNKVVRSLSKLKYMVVIDPLVTETSTFWQNHGESNDVDPSAIQTEVFRLPSTCFAEEDGSIANSGRWLQWHWKGQDAPGEARNDGEILAGIYHRLRELYRTEGGKGAEPLLKMSWRYKQPDHPESEEVAKENNGYALADLYDQNGTLLAKKGQLLNSFALLRDDGSTXSSCWIYTGSWTEQGNQMANRDNADPSGLGNTLGWAWAWPLNRRVLYNRASADINGKPWDAKRMLIQWNGNKWVGNDIPDFNTAPPGSNTGPFIMQQEGLGRLFALDKLAEGPFPEHYEPMETPLGTNPLHPKVVSSPVVRLYEEDAIRLGKKDKFPYVGTTYRLTEHFHTWTKHALLNSIAQPEQFVEISEGLAKSKGIANGDWVKVSSKRGFIRAVAVVTRRLRTLNVNGQQVETVGIPLHWGFEGVARKGYIANTLTPNVGDSNSQTPEYKAFLVNIEKA

SEQ ID NO: 6699 - DNA, 600 bp, Klebsiella oxytoca
  misc_feature (37)..(37): n is a, c, g or t
atgcatctggtaaaaaccatcctcaccgccggtctgnttttgtccgccgccgcccaggcccacaatgtgctggaatttccccagccggaaaacaacccggaagaattttacgccgtcactgagatcccgacgggcgggatcattaagtacgaaaccgatgctaaaacggggtttatcgtcgccgaccgctttcagtcgatgccggtggcctacccggcgaactacggctcgctgacccagtcgctggccggggatggcgacccgctggacgtggtgttttatacccgcgcgccgatggccccgggcacgctgattaagctgcgggcaattggtgtgctgaagatgatagacggcggtgagaaagacgacaaaatcatcgccgtaccggccagtaaaattgacccgacctacgacgacatcaagaccatctccgatctgccgaaaatagaacagcagcggctggaggccttcttccgggtctataaagaactgccggaggggcgtaaaaaggtcgagctggccggctttaatgacgccgcggccgcgaagcaggagatcaaatcggcctgggaggcctggaaggcgaagaacccgcaataa

SEQ ID NO: 6700 - protein, 199 aa, Klebsiella oxytoca
  misc_feature (13)..(13): Xaa can be any naturally occurring amino acid
MHLVKTILTAGLXLSAAAQAHNVLEFPQPENNPEEFYAVTEIPTGGIIKYETDAKTGFIVADRFQSMPVAYPANYGSLTQSLAGDGDPLDVVFYTRAPMAPGTLIKLRAIGVLKMIDGGEKDDKIIAVPASKIDPTYDDIKTISDLPKIEQQRLEAFFRVYKELPEGRKKVELAGFNDAAAAKQEIKSAWEAWKAKNPQ

SEQ ID NO: 6701 - DNA, 912 bp, Citrobacter rodentium
  misc_feature (572)..(572): n is a, c, g or t
gtgaatacactcgaacaaaccatcggcaatacccctctggtcaaacttcagcgtctgggaccggacaacggcagcgaagtctgggtcaaactcgaaggcaataatccggccggctcggtgaaagatcgcgccgcgctgtcaatgatcgttgaagcggaaaagcgcggcgaaattcagcccggagacgtgctgatcgaagcgaccagcggcaacaccggtattgcgctggcgatgatcgccgcgctgaaaggctaccggatgaagctgctgatgcccgacaacatgagccaggagcgtcgggccgcgatgcgcgcttacggcgccgagcttatcctggtcagcaaagagcaagggatggagggtgcccgcgacctggctctggagatggcccagcgcggcgaaggcaaactgctcgatcagtttaacaacccggataacccctacgcccactacaccaccaccggcccggaaatctggcagcagaccgcggggcgtatcacccactttgtctccagtatggggaccactggcaccattaccggcgtgtcacgttttctgcgtgaacagagtanaccggtgaccattgttggcctgcagccggaggaggggagcagtattcccgggatccgccgctggccggcagagtatatgccggggatctttaacgcttcgctggtggatacggtgctggatattcatcagcaggatgctgagaacaccatgcgtcagctggcggtgcgggaaggcattttctgcggcgtcagttcgggcggcgcggtagcgggcgcgttacgcatagcccgcgaaaatcctggcgcggtggtggtggcgattgtctgcgatcgcggcgatcgttacctttccaccggcgtcttcggcgaagaacactttagccagggggcgggcatttaa

SEQ ID NO: 6702 - protein, 303 aa, Citrobacter rodentium
  misc_feature (191)..(191): Xaa can be any naturally occurring amino acid
MNTLEQTIGNTPLVKLQRLGPDNGSEVWVKLEGNNPAGSVKDRAALSMIVEAEKRGEIQPGDVLIEATSGNTGIALAMIAALKGYRMKLLMPDNMSQERRAAMRAYGAELILVSKEQGMEGARDLALEMAQRGEGKLLDQFNNPDNPYAHYTTTGPEIWQQTAGRITHFVSSMGTTGTITGVSRFLREQSXPVTIVGLQPEEGSSIPGIRRWPAEYMPGIFNASLVDTVLDIHQQDAENTMRQLAVREGIFCGVSSGGAVAGALRIARENPGAVVVAIVCDRGDRYLSTGVFGEEHFSQGAGI

SEQ ID NO: 6703 - DNA, 1608 bp, Klebsiella oxytoca
  misc_feature (805)..(805): n is a, c, g or t
atgattgcatttacccgttggccggaagagtttgcggcccgctatcgtcaaaaaggctactggcaggatctgccgttaaccaatctgatcacccgtcacgcggacaatgacgccgtggcgattatcgatggcgagcggcagattagctaccgccagtttaaccagctggtggacaacctcgcctgctcgctgcagcgccagggactgaagcgcggggagaccgcgctggtgcagttgggcaatgtcgccgagttttacatgaccttctttgcgctgctgcgcatcggcgtcgcgccagtgaacgctttgttcagccaccagcgcagcgaacttaacgcctacgccgcgcagattaaaccggcgctgctgattgccgatcgcgagcacgctctgtttgctgacgatagctttctccacgcgtttatcgcggaacatccttccctgcgcgtcgcactgttgcgtaacgacggcggcgagcgcgatctggcgacggagattaaccgcccggcggataactttatcgccaatccaacccctgccgacgaagtggcctttttccagctctccggcggcagcaccgggacgccgaagcttatcccacgcacccataacgattacgactacagtatccgccgcagcaacgagatctgtgggattaacgctgaaacgcgctacctcaacgcgctgccggcggcgcataactatgcgatgagttccccgggttcgctcggcgtcttcctcgccggcgggcgggtgatcctcgccgctgacccgagcgccacgctctgtttcccgctgatcgaanaacatcagatcaacgttgcctcgctggtgccgccggcagtcagcctgtggctgcaggcgattcacgaatggggcagcaacgcccagctgcaatcgctgcagctgctgcaggtcggcggcgcgcgcctgtcagcgacgctcgccgcgcgcattccggcggaaatcggctgtcagctgcagcaggtgttcggcatggcggaagggctggtgaattacacccgcctcaacgatagcccggagcggattatcaacacccagggttgcccgatgtgtccggacgacgaagtgtgggtggcggacgccgacggcaacccgctgccgcgcggcgaagttggccgtctgatgacccgcggtccttataccttccgcggctattacaacagtccgcaacataacgctgaagcctttgatgccgatggattttactgctccggtgatctgatttcgatcgatgaagatggctatatcaccgtccagggccgggaaaaagatcagatcaaccgcggcggcgagaagatcgccgctgaagagatcgaaaacctgctgctgcgccatgaggcggtgatccacgccgcgctggtcagcatcgaagacaatctgctgggcgagaaaagctgcgcttatctggtggtgacctcgccgctgcgcgccgtcgccgtgcgccgcttcctgcgcgagcagggggtggcggaatttaaactgccggaccgcgtggagtgcgttgccgcgctgccgctgacgccggtgggcaaagtcgataaaaaacaattacgtcagtggctggccgaaggcaagctgggctga

SEQ ID NO: 6704 - protein, 535 aa, Klebsiella oxytoca
  misc_feature (269)..(269): Xaa can be any naturally occurring amino acid
MIAFTRWPEEFAARYRQKGYWQDLPLTNLITRHADNDAVAIIDGERQISYRQFNQLVDNLACSLQRQGLKRGETALVQLGNVAEFYMTFFALLRIGVAPVNALFSHQRSELNAYAAQIKPALLIADREHALFADDSFLHAFIAEHPSLRVALLRNDGGERDLATEINRPADNFIANPTPADEVAFFQLSGGSTGTPKLIPRTHNDYDYSIRRSNEICGINAETRYLNALPAAHNYAMSSPGSLGVFLAGGRVILAADPSATLCFPLIEXHQINVASLVPPAVSLWLQAIHEWGSNAQLQSLQLLQVGGARLSATLAARIPAEIGCQLQQVFGMAEGLVNYTRLNDSPERIINTQGCPMCPDDEVWVADADGNPLPRGEVGRLMTRGPYTFRGYYNSPQHNAEAFDADGFYCSGDLISIDEDGYITVQGREKDQINRGGEKIAAEEIENLLLRHEAVIHAALVSIEDNLLGEKSCAYLVVTSPLRAVAVRRFLREQGVAEFKLPDRVECVAALPLTPVGKVDKKQLRQWLAEGKLG

SEQ ID NO: 6705 - DNA, 951 bp, Kluyvera intermedia
  misc_feature (540)..(540): n is a, c, g or t
gtgaacttccagcagctgaaaattatccgtgaggcggcccgtcaggattacaacctgacggaagtcgcgaatatgctctatacctcgcagtcaggcgtcagtcgccatatccgggaactggaagaggagctggggattgagatctttatccgccgcggcaaacgcctgttaggcatgaccgagccgggtaaagcgctgttatcgattgccgagcggatcctcaatgaagccagtaacgttcggcggctggcggatctcttcactaacgatgcgtcaggcgtcttaactatcgccaccacccatactcaggcgcgctacagcctgcctccggtcattaaagctttccgcgagctgttctcagatgttcgcgtcgagctggtgcagggtaccccgcaggaaatcgaagcgctgctgcataacggcggagcggatatcggcatcgccagcgagcgcctgagcaacgatccgacgctggcggctttcccctggttccgctggcatcacagcctgctggtgccgaaggatcatcctttgacgcangtttcccccctgacgctggaggcgatcgcccgctggccgttaatcacctaccgccaggggatcactggccgttcgcgcatagatgaggcgttcaaccgcaaggggttgatgccggatatcgtgctgagcgcgcaggattccgatgtgatcaagacctacgtggagctggggctgggcgtcgggctggtcgccgagcagtccggtgatgcccgggaagcggacacctttacgcgtcttgatacccgccatctgttcgatgccaataccgtgtggttgggactgaagcggggccagctgcagcggaattacgtttggcgctttatcgaattgtgcaatgccggactgtcgctggatgagattaagcgtcaggcgatggagccggaagaggccgcaatcgactatcagatttaa

SEQ ID NO: 6706 - protein, 316 aa, Kluyvera intermedia
  misc_feature (180)..(180): Xaa can be any naturally occurring amino acid
MNFQQLKIIREAARQDYNLTEVANMLYTSQSGVSRHIRELEEELGIEIFIRRGKRLLGMTEPGKALLSIAERILNEASNVRRLADLFTNDASGVLTIATTHTQARYSLPPVIKAFRELFSDVRVELVQGTPQEIEALLHNGGADIGIASERLSNDPTLAAFPWFRWHHSLLVPKDHPLTXVSPLTLEAIARWPLITYRQGITGRSRIDEAFNRKGLMPDIVLSAQDSDVIKTYVELGLGVGLVAEQSGDAREADTFTRLDTRHLFDANTVWLGLKRGQLQRNYVWRFIELCNAGLSLDEIKRQAMEPEEAAIDYQI

SEQ ID NO: 6707 - DNA, 1488 bp, Klebsiella pneumoniae
  misc_feature (151)..(151): n is a, c, g or t
atgactgaaaatacgccttatcagcagcttacccgtacctttcagcgcctgtcgcgcttttcgcatctcgccgccatcgccggctgggatatgttcgcgatgatgcccccgggcgggagcgtcgcccgcggcgaagcgctggccgagctcngcgtgctgcagcatcagatcctgaccgataaaaaagtgggacaatggttacaggaggcccgccagcaggatcttaatgatgttgaacaggccaacctgcgggaaatgcagcgtcagtacgatcaggcggcgctgctgccggagagcctggtggaagcaaaatcgctggccggcagccgctgcgagcatgcctggcgcagccagcgtcccgccaatgactggacgggctttgccgacaacctacgcgaggtggtcagactgagccgtcaggaagcgcagatccgcgccgatgccaggggcggctcacgttacgacgcgctgctggatattttcgaaccggatatgaccagcgcgcggctggacagcctgttcgccgatctcaaatcgtggctaccttccctgcttagccaggcggtggagaagcaggcgaagcagacgctaatcgccccgcaggggcctttccccattgctgaacaacgggagctgggcctgcaggcgatgcgtatccttggctttgacttcgacggcgggcgcctcgacatcagcgcccacccgttctgcggcggcgtaccccaggatgtgcgcatcaccacccgctacaacgaaaacgacctgctcagcgctctgttcggcgtgatccacgaaaccggccacgcccgctacgagcagaatctacctcgcccgtgggtcgaccagcccgtaggactcgcccgctccaccgctatccacgagtcgcagagcctgttttttgaaatgcagctgggacgcagcgagcggtttcttaaccgcctgttaccggcggtgcgcgagcggtttggcgatcggccggcctttagccaggacaattttgtcgcctggaatcagcaggtgaaacccggctttattcgcgtcgatgccgatgaggtgagctacccggcgcatgtcatcctgcgttatgaaattgaacgtgcgctgatcgacggcgagattgaggtagatgatatcccgtcgctgtgggacgagaaaatgcagcactggctggggctgtcgaccaccggcaactatcgggatggttgcatgcaggatattcactggaccgacggcggattcggctatttcccttcctataccctgggcgcgatgtatgccgcgcagttgatggccgcggcccgccgcgcgctgccgacattagatcgcgatattgaggaaggcgatttcagcgccctgttcgactggctgcggcagaatatctggcagcatggcagccgcttcaccacctcgcagttgattcagcaggccaccggtgaggatcttaatagccgctacttccgcgagcacctgaccactcgctacctgtaa

SEQ ID NO: 6708 - protein, 495 aa, Klebsiella pneumoniae
  misc_feature (51)..(51): Xaa can be any naturally occurring amino acid
MTENTPYQQLTRTFQRLSRFSHLAAIAGWDMFAMMPPGGSVARGEALAELXVLQHQILTDKKVGQWLQEARQQDLNDVEQANLREMQRQYDQAALLPESLVEAKSLAGSRCEHAWRSQRPANDWTGFADNLREVVRLSRQEAQIRADARGGSRYDALLDIFEPDMTSARLDSLFADLKSWLPSLLSQAVEKQAKQTLIAPQGPFPIAEQRELGLQAMRILGFDFDGGRLDISAHPFCGGVPQDVRITTRYNENDLLSALFGVIHETGHARYEQNLPRPWVDQPVGLARSTAIHESQSLFFEMQLGRSERFLNRLLPAVRERFGDRPAFSQDNFVAWNQQVKPGFIRVDADEVSYPAHVILRYEIERALIDGEIEVDDIPSLWDEKMQHWLGLSTTGNYRDGCMQDIHWTDGGFGYFPSYTLGAMYAAQLMAAARRALPTLDRDIEEGDFSALFDWLRQNIWQHGSRFTTSQLIQQATGEDLNSRYFREHLTTRYL

SEQ ID NO: 6709 - DNA, 1488 bp, Klebsiella pneumoniae
  misc_feature (1161)..(1161): n is a, c, g or t
atgactgaaaatacgccttatcagcagcttacccgtacctttcagcgcctgtcgcgcttttcgcatctcgccgccatcgccggctgggatatgttcgcgatgatgcccccgggcgggagcgtcgcccgcggcgaagcgctggccgagctcggcgtgctgcagcatcagatcctgaccgataaaaaagtgggacaatggttacaggaggcccgccagcaggatcttaatgatgttgaacaggccaacctgcgggaaatgcagcgtcagtacgatcaggcggcgctgctgccggagagcctggtggaagcaaaatcgctggccggcagccgctgcgagcatgcctggcgcagccagcgtcccgccaatgactggacgggctttgccgacaacctacgcgaggtggtcagactgagccgtcaggaagcgcagatccgcgccgatgccaggggcggctcacgttacgacgcgctgctggatattttcgaaccggatatgaccagcgcgcggctggacagcctgttcgccgatctcaaatcgtggctaccttccctgcttagccaggcggtggagaagcaggcgaagcagacgctaatcgccccgcaggggcctttccccattgctgaacaacgggagctgggcctgcaggcgatgcgtatccttggctttgacttcgacggcgggcgcctcgacatcagcgcccacccgttctgcggcggcgtaccccaggatgtgcgcatcaccacccgctacaacgaaaacgacctgctcagcgctctgttcggcgtgatccacgaaaccggccacgcccgctacgagcagaatctacctcgcccgtgggtcgaccagcccgtaggactcgcccgctccaccgctatccacgagtcgcagagcctgttttttgaaatgcagctgggacgcagcgagcggtttcttaaccgcctgttaccggcggtgcgcgagcggtttggcgatcggccggcctttagccaggacaattttgtcgcctggaatcagcaggtgaaacccggctttattcgcgtcgatgccgatgaggtgagctacccggcgcatgtcatcctgcgttatgaaattgaacgtgcgctgatcgacggcgagattgaggtagatgatatcccgtcgctgtgggacgagaaaatgcancactggctggggctgtcgaccaccggcaactatcgggatggttgcatgcaggatattcactggaccgacggcggattcggctatttcccttcctataccctgggcgcgatgtatgccgcgcagttgatggccgcggcccgccgcgcgctgccgacattagatcgcgatattgaggaaggcgatttcagcgccctgttcgactggctgcggcagaatatctggcagcatggcagccgcttcaccacctcgcagttgattcagcaggccaccggtgaggatcttaatagccgctacttccgcgagcacctgaccactcgctacctgtaa

SEQ ID NO: 6710 - protein, 495 aa, Klebsiella pneumoniae
  misc_feature (387)..(387): Xaa can be any naturally occurring amino acid
MTENTPYQQLTRTFQRLSRFSHLAAIAGWDMFAMMPPGGSVARGEALAELGVLQHQILTDKKVGQWLQEARQQDLNDVEQANLREMQRQYDQAALLPESLVEAKSLAGSRCEHAWRSQRPANDWTGFADNLREVVRLSRQEAQIRADARGGSRYDALLDIFEPDMTSARLDSLFADLKSWLPSLLSQAVEKQAKQTLIAPQGPFPIAEQRELGLQAMRILGFDFDGGRLDISAHPFCGGVPQDVRITTRYNENDLLSALFGVIHETGHARYEQNLPRPWVDQPVGLARSTAIHESQSLFFEMQLGRSERFLNRLLPAVRERFGDRPAFSQDNFVAWNQQVKPGFIRVDADEVSYPAHVILRYEIERALIDGEIEVDDIPSLWDEKMXHWLGLSTTGNYRDGCMQDIHWTDGGFGYFPSYTLGAMYAAQLMAAARRALPTLDRDIEEGDFSALFDWLRQNIWQHGSRFTTSQLIQQATGEDLNSRYFREHLTTRYL

SEQ ID NO: 6711 - DNA, 843 bp, Klebsiella pneumoniae
  misc_feature (728)..(728): n is a, c, g or t
atgaaaaatctctcccccctgcacgcagaaagccgcgtcagctggctggcgcataccgccagcgcctgtctgattgacgaagcccgtctgagcccgaaaccgggtctggtggatagccgcggcaacggcgcgcatcaggacctgaatctggcgctgatggagcgctccgcccgcagcctgcagccgacctttcacgcgctggccgagcaaagctggcgtcgcccggcggacatcgcgctgcgcgaaaccgtcggccgccttggccgcgaaggcgaagcgcagatgatgctggcgacgggtggggttaacacccaccgcggcgctatctgggcgctaggcctgctggtcagcgcggtggcgatgttgggtggagagggtcagtcacaggcgatcgccgacgccgccgccgccctcgcccgcctgcccgacggcttcgcgccgaaaagctttagtaaagggcttcgcgccagccgccgctggcaggtgccaggcgcccgcgaggaagcgcagtgtggtttcccgcatatcacccgcctggcgctgccgcaactgcagcacagccgggcgcgaggcgccagtgagccgcaggcgcagcttgatgcgctgatggccatcatgacctcgctgagcgatacctgcgtgctgtcgcgcgccggtatggccgggctgcaggccatgcagcaaggcgcttgtgaggtgctggcggctggcggttgcgccagtttcgncgggcgcgccgccctggcccgcctggacgcaatcatgctggcgctaaacgcctcgccgggaggcgccgccgatctccttgccgccaccctgtttctcgacagagttgccggctaa

SEQ ID NO: 6712 - protein, 280 aa, Klebsiella pneumoniae
  misc_feature (243)..(243): Xaa can be any naturally occurring amino acid
MKNLSPLHAESRVSWLAHTASACLIDEARLSPKPGLVDSRGNGAHQDLNLALMERSARSLQPTFHALAEQSWRRPADIALRETVGRLGREGEAQMMLATGGVNTHRGAIWALGLLVSAVAMLGGEGQSQAIADAAAALARLPDGFAPKSFSKGLRASRRWQVPGAREEAQCGFPHITRLALPQLQHSRARGASEPQAQLDALMAIMTSLSDTCVLSRAGMAGLQAMQQGACEVLAAGGCASFXGRAALARLDAIMLALNASPGGAADLLAATLFLDRVAG

SEQ ID NO: 6713 - DNA, 903 bp, Klebsiella pneumoniae
  misc_feature (527)..(527): n is a, c, g or t
atgaagattttatttacctttcccggtcagggcggccagcgtcccggcatgctggcgatgatccccgatcgcgaggcaatcctcacccaggcgcgcgccgtgctgggggatgaagtcgctactctcgatagcgccgatgcgctacaacacacccgtgcggtccagctctgtctgctgatcgccggtgtcgcctgggcgcgcgagctacagcgtcagggcgtggatccgcagatggtcagcggcctgtccatcggcgcgtttccggccgcggtgattgccggcgcgctcgatttcgccagcgcgttgcggctggtggccctgcgcggggacttaatggaacaggcgtatcctgaaggttacggactgacggcgattatgggcctgacccgcccgcgggttgaggcgctgatgcagggccacgaggtttatctcgccaacctgaacgccgaaacgcagttcgtgattgcgggccgtgatgaggcaatggccgaggtggcgcagctggcgctgcgggctggcgccagtanagcccagcggctggcggtcagcgtgccgtcgcactgcgcgctgctggataaacccgccgctgagctggcgaaagcttttgccggcgccagcttaaggcgcccacggtgcgcctatttaagcggctcgacggcgcgcgtgctgtgggatccgcagcggatcgccgacgatctggcgatgaacatggcgcgcccggtccactggcaggaggcgatggtcgccgccgatgagcgcgatgcgcgcttagccattgagatgccccccgggggggtgctcacctgcctgacccgccaggcgggctggcgcggggagaccattgcgctggagcgcagcggcctggacgtcgcccgccatctggcgcagcggcttagcgattaa

SEQ ID NO: 6714 - protein, 300 aa, Klebsiella pneumoniae
  misc_feature (176)..(176): Xaa can be any naturally occurring amino acid
MKILFTFPGQGGQRPGMLAMIPDREAILTQARAVLGDEVATLDSADALQHTRAVQLCLLIAGVAWARELQRQGVDPQMVSGLSIGAFPAAVIAGALDFASALRLVALRGDLMEQAYPEGYGLTAIMGLTRPRVEALMQGHEVYLANLNAETQFVIAGRDEAMAEVAQLALRAGASXAQRLAVSVPSHCALLDKPAAELAKAFAGASLRRPRCAYLSGSTARVLWDPQRIADDLAMNMARPVHWQEAMVAADERDARLAIEMPPGGVLTCLTRQAGWRGETIALERSGLDVARHLAQRLSD

SEQ ID NO: 6715 - DNA, 1179 bp, Klebsiella pneumoniae
  misc_feature (943)..(943): n is a, c, g or t
atgcaaaagctgattaacgccgtgcagaactatgcatggggaagccacaccgccttaaccgaactctatggcatcgccaacccggacaatctgccgatggcagagctgtggatgggggcgcatccgaagagcagttcgcagatcctggcggccgacggccagccgcgttcgctgcgcgaggtgattgacgcggataaagccgctctgctcggcgacaaggttgccgcccgctttggtgaactgccgttcctgtttaaggtactgtgcgccgctcagccgctctcaattcaggtgcatcccaacaagcaggcctcggaagaaggtttcgcccgcgagaacgccgccggtatcccgctctccgccgccgagcgtaactacaaagatccgaaccacaaaccggagctggtttttgccctgacgccgttcctggcgatgaatgcatttcgcgagttcagcgagattgtcaccctgctgcagccggtggctagcgcgcatccggcaatcggcgccttcctgcagcagccggacgcgactcacctgagccagctgtttgccagcctgctaaatatgcagggtgaggaaaaggccaaggcgctgcaggtgctgcgcgacgtactggcccgtgaacaaggcgaaccgtggcagactatccgcctgatcgcggaattctatccggacgacagcggcctcttctccccgctgctgctgaacgtggtgaagctgaacccaggcgaagcgatgttcctgtttgctgaaacgccgcacgcctatctgcagggggtggcgctggaggtgatggccaactcggataacgtactgcgcgccggcctgacgccgaaatacattgatattcctgagctggttgctaacgtcaagttcgaggctaaaccggcgggtgagctgttgacccagccgcagcgtcacggcgcggaactcgacttcncgatcccggtggaagattttgccttctccctgcatgacctctccgccgaggccagcgatctggcccaggcaagcgcggcgatcgtgttctgcgtcgacggcgaagccgtactgcgcaaaggcgaccagagcctgaccctcaagccgggcgagtcggccttcgtggccgccagtgaatcgccggtgcaggtcagcggccgcggccgcgtggcgcgcgttttcaataagctccagtaa

SEQ ID NO: 6716 - protein, 392 aa, Klebsiella pneumoniae
  misc_feature (315)..(315): Xaa can be any naturally occurring amino acid
MQKLINAVQNYAWGSHTALTELYGIANPDNLPMAELWMGAHPKSSSQILAADGQPRSLREVIDADKAALLGDKVAARFGELPFLFKVLCAAQPLSIQVHPNKQASEEGFARENAAGIPLSAAERNYKDPNHKPELVFALTPFLAMNAFREFSEIVTLLQPVASAHPAIGAFLQQPDATHLSQLFASLLNMQGEEKAKALQVLRDVLAREQGEPWQTIRLIAEFYPDDSGLFSPLLLNVVKLNPGEAMFLFAETPHAYLQGVALEVMANSDNVLRAGLTPKYIDIPELVANVKFEAKPAGELLTQPQRHGAELDFXIPVEDFAFSLHDLSAEASDLAQASAAIVFCVDGEAVLRKGDQSLTLKPGESAFVAASESPVQVSGRGRVARVFNKLQ

SEQ ID NO: 6717 - DNA, 543 bp, Klebsiella quasipneumoniae
  misc_feature (383)..(383): n is a, c, g or t
gtgttacgtataagtttgactaaaaccgcctgtctgctgcccctgcttgcgctttgcctgagcggatgcggactcacccagcgcgtctcggagggaacaaagtctgccttcaacgccgttttttataagaaaattaatacgctgcatctggactttaccgcgcgcgaagcgctcaacaccgatgccagagagaatcactcgctctctgaaccggtggtggtgcgcatctatcagcttaaagatcgccagacctttgaccggctggtttaccagcagctgctggaggagggggatattctgctcgccgccgatctcctcgccagtcgcgatgtggtgatcggtcccggaggggacgccagtctgaatatgccgctggaagcggnggcgacgttcgtggcggttgtcggcctgttccgccatccggacacacaaagaaatacctggaagcaggtgctggcgcgtgaggaattggatccggacaagccgcgcattttcaccgccgaacacaaccagctacggctcaggcctgaagcggcgaagtaa

SEQ ID NO: 6718 - protein, 180 aa, Klebsiella quasipneumoniae
  misc_feature (128)..(128): Xaa can be any naturally occurring amino acid
MLRISLTKTACLLPLLALCLSGCGLTQRVSEGTKSAFNAVFYKKINTLHLDFTAREALNTDARENHSLSEPVVVRIYQLKDRQTFDRLVYQQLLEEGDILLAADLLASRDVVIGPGGDASLNMPLEAXATFVAVVGLFRHPDTQRNTWKQVLAREELDPDKPRIFTAEHNQLRLRPEAAK

SEQ ID NO: 6719 - DNA, 1755 bp, Klebsiella quasipneumoniae
  misc_feature (65)..(65): n is a, c, g or t
atggacgatttaaccctgcgttattacgacgctgaaatgcgctacctgctggaagcgggtgaagngtttgcccgcgctcatcctgagcaggcggcaatgctcaatctcgacaaagcgggcgctcgcgacccctttgtcgagcgtctgtttgaaggttttgccttcctgatgggccgcatgcgcgagaaactcgatgacgatctgcctgagctgaccgaaggcgtggtcagtctgctgtggccacattatttacgtaccattccctcgatgtcggtcgtggagttcacccccgactggccggaaatgaaagagccgatgacgatggccaaaggctttgaagtgctttcccggccgatcggtgaaaagggcacgcgctgccggtacaccaccaccaaagcgatcgctctgcagccgttatccctggaacgcgtccagctggccaccgatacggatggccggtcggtgatcacgctgcgctttacctgcagccagctgacggactggcgccgggtcgatctcagtcatatcccgctgtactgcaacgccgatgcgccgctggcctgcgccatgcacgaggcctttaccctcaatgtggcccggatgtggctgcgcatgcccgaagaggtggacagaaggccgctggacgggtatttcagcgcgctgggatttggcgaggatgacggcctctggcctgaagatggccgcagttttcgcggttatcagctgctgctggagtattttaccttccgcgaaaagttcatgttcatcgatctgcgcgggctggagacggtggcttttccggccggactggcgtggtttgaaatcgacgtcgtgctggcggaacgctgggaacatgacttccgcttcagcgaaaagcagctgcgcctgcactgcgtgccagtgatcaacctgtttccgctggagtccgatccgctgaccatcaattccctgcagaccgaatacccgctgcgcccgatgcgcgtgcaggacggccacaccgaaatttacaccgtcgattccgtgatctcctcacaccagcaggtttacgcgccgttctcaagttttcgccacaaaggcggcatgatgcgtcatgacgcggcggactattactatcatacccgggtgcgccgtggcccctccgggctgtacaacacctggcttatcgtcggcggagaagcctttgataatcataccgtaccggaagatgaaagcctgtcgctgaccctcaccggaaccaacggccagctgccgcgtcgcgcgctgcagagcaccgtgctcgatacggtgatgaaaaccacttccgccagtattgcagtgcgtaacctctgcgcgccgacgctgccgtgctatccccccgcccaggaccgttttcactggcgggtgctgagccatctgggcagcagttttctttccctgatggataacgcggaggtcctgcgcggcaccctggcgctgtatgaatggaccgacagcgagatgaatcgtcggcgtctggaagccatcctcgacgtgaagcaccgcgcaacagagcgctttgcacagggccatctggtgcgcggcgtgcagattgaagtcaccctcgacagtcacggctttgccggacgtggcgatatatgcctgtttggcgagatgcttagccgcttcttcgcgctctacaccgacatctacttgttcaaccgcctgattatcattctgcaaccaaccggagaacgactggaatgggaagagaagcacagccgccgcattcccggctga

SEQ ID NO: 6720 - protein, 584 aa, Klebsiella quasipneumoniae
  misc_feature (22)..(22): Xaa can be any naturally occurring amino acid
MDDLTLRYYDAEMRYLLEAGEXFARAHPEQAAMLNLDKAGARDPFVERLFEGFAFLMGRMREKLDDDLPELTEGVVSLLWPHYLRTIPSMSVVEFTPDWPEMKEPMTMAKGFEVLSRPIGEKGTRCRYTTTKAIALQPLSLERVQLATDTDGRSVITLRFTCSQLTDWRRVDLSHIPLYCNADAPLACAMHEAFTLNVARMWLRMPEEVDRRPLDGYFSALGFGEDDGLWPEDGRSFRGYQLLLEYFTFREKFMFIDLRGLETVAFPAGLAWFEIDVVLAERWEHDFRFSEKQLRLHCVPVINLFPLESDPLTINSLQTEYPLRPMRVQDGHTEIYTVDSVISSHQQVYAPFSSFRHKGGMMRHDAADYYYHTRVRRGPSGLYNTWLIVGGEAFDNHTVPEDESLSLTLTGTNGQLPRRALQSTVLDTVMKTTSASIAVRNLCAPTLPCYPPAQDRFHWRVLSHLGSSFLSLMDNAEVLRGTLALYEWTDSEMNRRRLEAILDVKHRATERFAQGHLVRGVQIEVTLDSHGFAGRGDICLFGEMLSRFFALYTDIYLFNRLIIILQPTGERLEWEEKHSRRIPG

SEQ ID NO: 6721 - DNA, 948 bp, Klebsiella pneumoniae
  misc_feature (821)..(821): n is a, c, g or t
atgaaagcagccgtggtttttgatctcgcagaaggcccggtttgggccgattttatcgacccgcagcccgcgcccggccagacgctcattgacgtccgcgccgccgcgataagccatgtggttaaggcccgggcatccggacgccattacagcttcgacggcaatctgccctttgtgcccggtatcgatggcgtcggcaccacacctcagggccagcgcgtctacttcgccttccccaccgcccccttcggcagtatggcgcagcgggcgccggtcgccctgcagaattgtctgccgctgccggatgcgctcgatgatatccaggcggcggcgatggccaaccccggtatgtccgcgtgggcatcgctggtgacacgcgcccagcttcaggccggcgaaacggtgctgattaacggcgccaccggcagcgccggtcagttggcggtgcagattgcccgctatctgggggcgaaaaaaatcattgcaaccgggcgcaatgcgcagtcgctggcggcgctggacgccgatgagtgtattcagttaaccgctgatgataaaaacttgagcgggcaattttcagcggtcagcgccgcgcagatcgatgtggtcatcgattacctgtggggacacagcgcggaattattattgccggcactggcgaaatatacccctgccggcagtccggtgcgctatgtgcaggtgggttccctggctggcgccgatatcgcgttaaatggcgcagtgctgcgttccgccccgctcctgctgatgggcagcgggatcggtagcctgtcggtatcgcagctgctggcggcgaccgntgaaatgctgcaggcggcggtgccggggaaattgaccatcgccaccaccccgcggccactgcaggagatcgcggcggcctggccgcaggacgacagccagaagcgcacggttttcaccctcggataa

SEQ ID NO: 6722 - protein, 315 aa, Klebsiella pneumoniae
  misc_feature (274)..(274): Xaa can be any naturally occurring amino acid
MKAAVVFDLAEGPVWADFIDPQPAPGQTLIDVRAAAISHVVKARASGRHYSFDGNLPFVPGIDGVGTTPQGQRVYFAFPTAPFGSMAQRAPVALQNCLPLPDALDDIQAAAMANPGMSAWASLVTRAQLQAGETVLINGATGSAGQLAVQIARYLGAKKIIATGRNAQSLAALDADECIQLTADDKNLSGQFSAVSAAQIDVVIDYLWGHSAELLLPALAKYTPAGSPVRYVQVGSLAGADIALNGAVLRSAPLLLMGSGIGSLSVSQLLAATXEMLQAAVPGKLTIATTPRPLQEIAAAWPQDDSQKRTVFTLG

SEQ ID NO: 6723 - DNA, 360 bp, Klebsiella pneumoniae
  misc_feature (247)..(247): n is a, c, g or t
atggttactgcattaatcatcgtcgccgccatcgcctggcttacccagctggcctttggcggctggcagatccgccgcttcaatcgcgcctttgatagcctgtgccagcaggggcgggtgggcgtcggccgctccgccggacgctttcaaccgcgcgccatcgtcgccatcgccgtcgatgataacgaccgcattagcgacacgctgctgatgaaaggcttcaccattttcgccagtccgcaaaagntcccggctctggcaggcaaacatattgcggaattgcagcctgatgtgatctttccccatgatccgcgctgtcagaatgcactatcattagcgcttaatccgaaacatggataa

SEQ ID NO: 6724 - protein, 119 aa, Klebsiella pneumoniae
  misc_feature (83)..(83): Xaa can be any naturally occurring amino acid
MVTALIIVAAIAWLTQLAFGGWQIRRFNRAFDSLCQQGRVGVGRSAGRFQPRAIVAIAVDDNDRISDTLLMKGFTIFASPQKXPALAGKHIAELQPDVIFPHDPRCQNALSLALNPKHG

SEQ ID NO: 6725 - DNA, 1194 bp, Escherichia coli
  misc_feature (588)..(588): n is a, c, g or t
atggttccgcgtttcgccaccttaggccgtatccccaaaggcgtttgggtactcggcggcgtcagcctgctgatggatgtctcctccgagatgatccacagcctcttaccgctgtttatggccactaccctcggcgccagcgtgataattatcggtcttatcgagggactggcggaagccaccgccctgatcctgaaggtcttctccggcgcaatcagcgactatgtcggcaagcgtaaaggactggcgctgctgggctacggcctgggcgcgctcagtaagccgctgtttgccatcgcccctaccgccggggtggtgtttagcgcccgcatgattgaccgcgtaggcaaaggtattcgcggcgcgccgcgcgatgcgctggtcgccgatgtcaccccgccggagatccgcggcgccgcctacggactacgccaggcgctggataccgtcggcgcctttctcggcccgctgctggcggtgctgctgatgtttatctgggccaacgattttcacgctattttctgggtggcggtcattcccgccgtgctctccattctcctgctcggattcggcctacaggagccaaantccgccatcgcgcacaaacgcagcaatccgctgaagcgcgaaaacctgaaaaagctctccgccgcctactggtgggtggtcgcgatcggcagcattttcaccctcgcccgcttcagcgaagcctttctggtgctgcgcgcccagcagatggagatcccgctctataccatcccgctggtgatggtggcgatgaacctggtctacagcctcacggcttacccgttcggtaaactctcagacagcatgagccacagcaaactgctgcagtgggggctgctggtgttgatcctcgccgatatcgtgctggcgctcagcagccactggagcacgctgctgatcggcgtcgcgctgtgggggattcatatgggaatgacccagggcctgctggcggcgatggtcgcccatacggcgccaccggagctacgcggcacggcgttcggtatgtttaatctgatgagtggcctggctctgctgctggccagcaccggcgcgggggtactgtgggaaaccttcggcgccgcctcgacgttttacgccggggcgataatttgcgtggtcacgctcatcggcatgcgcgtgatgccgtcggcctatcgtcaggattaa

SEQ ID NO: 6726 - protein, 397 aa, Escherichia coli
  misc_feature (196)..(196): Xaa can be any naturally occurring amino acid
MVPRFATLGRIPKGVWVLGGVSLLMDVSSEMIHSLLPLFMATTLGASVIIIGLIEGLAEATALILKVFSGAISDYVGKRKGLALLGYGLGALSKPLFAIAPTAGVVFSARMIDRVGKGIRGAPRDALVADVTPPEIRGAAYGLRQALDTVGAFLGPLLAVLLMFIWANDFHAIFWVAVIPAVLSILLLGFGLQEPXSAIAHKRSNPLKRENLKKLSAAYWWVVAIGSIFTLARFSEAFLVLRAQQMEIPLYTIPLVMVAMNLVYSLTAYPFGKLSDSMSHSKLLQWGLLVLILADIVLALSSHWSTLLIGVALWGIHMGMTQGLLAAMVAHTAPPELRGTAFGMFNLMSGLALLLASTGAGVLWETFGAASTFYAGAIICVVTLIGMRVMPSAYRQD

SEQ ID NO: 6727 - DNA, 3477 bp, Klebsiella pneumoniae
  misc_feature (2388)..(2388): n is a, c, g or t
atgcgcaagctctcactaagtttactcacgctgtccctcggcgttgcgctgctgccgttagcgcaggcggcgacgacgcctgcccaggagcatctgctggagcaggtccgcctcggcgaggccagcaatcgtgaagacctggtgcgccagtcgctgtaccgtctggagctgattgatcccaacaacccggagctgattgccgcgcggatgcgctatctgctgcgtcagggggatgccgccggggcgcaaaaagagctggaacgactgacgaagctggcgccggactccccggagctgaaggcgtcgcgcaatgagatgaaaagcaacaccggcgagggccgccaggcgctgcagcaggcgcgactgctgggcgtggccgggaaggtcgatgaagccatcgccgcctatgaaaaactgtacggcggggtgccggatgacgttgacgtcgccattgaatactggacgctggtggcgcgcctgccgtcccgccatagcgaaggcgtcagccagttgaaaaaactgaacgccagcgcgccgggcaacgtcagcctgctgacttcgctggcgaagcagatgttcgccgataacaaactgcaggaggggttcgcctatctggcggagatggcccgatcggcctcgggacgcggtatcgccgccgatatgtggttcagtgaggtgaaaagcatgccggtgagcaaggccagcgtgcaggcgttgcagcaatttcttctgcagtttcccaccggctcggtggcggcgaacgcccgcgttctgctcgaccaacagcaggcgcagctgcaggatccgactttccgcgcccgctcggaagggctggcggcggtcaagtccgggaataccacgcaggcggtcgcggatctgcagaaagccgttcaggccgacagccgcgacagcgacgcggtgggcgctctcggccaggcctattcccagcgcggcgaccgcgcgcgggcagtggcgcagctcagtaaagcgattgccatggaccctgacagcccgaaccgcggcaagtgggacagcctgctgcaaactaaccgctactggctgctgataaagcagggggataacgccctgaaagccggccagctttcgcaggcgcagaactattatgcccaggcgcagcgggtcgatcgcaccgacagctatgccgtgctggggctgggggatgtcgcggcggcgcgcaaagaggcggcggcggagcgctattaccagcaggcgttgcgcctggatcgcggcaataacctggcggtgcgcggcctggccaacctctatcgcgccgaatcgccggagaaagccagcgcctggatcgccggcctccctcccgctcagcggcgcagtatcgatgatattgagcgcagcctgactaacgaccggctggagaaacaggcgcaggctctggagagccagggcaactgggcgcaggcggcggaagttcagcgtcggcgcctggcgctggatccggacagcgtctggataacctaccgtctggcgcgggatctggtcagcgctggcgaacgccaggaggccgacgcgctgatgcggacgatggtcaaccgccagccgcaggacgccgaacgggtctacgcctcgggactctacctgtcggggaacgaccaggacgatctggctctggcgcaaatcgccgctctgccgcgcagcgcgtggacggataacattcgtgaactcgaagcgcgcctgcaaagcgaccgggtgctgcgccaggccaaccagctgcgcgacagcggcgacgaagcgcaggcgatcgccctcatcaaacggcaacccgcctcggtgcgctatgatctgacgctggccgactgggcgcagcagcgcggcgacagccagacggcgattgccgactatcagcgggtgctgcgtcaggaggccgacaacggcgatgcgcgcctcggccttgcggaagtctacctggccgagggcgataaaccggccgcccgggcgcaggtcatgcagctgaaaggcgcagagaccgaatccatgaacatgcagcggcgggtggcgctggcgcgagctggccttggcgataccgctgacgcgcaacggatttttaatcagattgtgccgcaggcgaaggcgcagccgccctcgatggagagcgcgctggtgctgcgcgatgctgcgcgctttgccacccagagcggggcgccgcagcaggcgctgacgcactaccgggaagcgatggtggcctccggcattacccccgcgcagccgcaggataacgatacttttacgcggctgacgcgcaacgacagccatgatgactggctgaagcgtgggatccgcagcgatgccgccgacctttatcgtcagcaggatctgaacgtcaccctggaacatgacttctggggttccagnggcaccggcggctattccgacctgaaggcgcataccaccatgctgcaggtggatgctccgctggcggatggccggatgttctttcgcaccgatctggtcaatatggatgccggcagcttttccacccacagcgacgggagctactcgcccagctggggcacctgcggggagatcgcctgtaccagcggcagtaaaaatcagaccgacagcggggccagcgtggcggtcggctggaagaatgacacctggagcggggatatcggcaccacgccgatgggcttcaatgtcgtcgatgtggtgggggggctgagctacagcagcgacgtcgggccggtggggtacacggtcaacgtccaccggcggcctatctccagctcgctgctctcctttggcgggcagaaggacagcagcagccataccggcgccacctggggcggcgtccgcgccgacggcggcggcctgagcctgagctacgatcgcggggaggctcacggcatctggtcctcgctgggcgccgactcgctgaccggtaaaaacgtggcggataactggcgcgtgcgctggatgaccgggtactactacaaggtcatcaacgagaataatcgtcgcgtcaccgtcggcctcaacaatatgatctggcactacgacaaagatctcagcggctacaccctcggccagggcggctattacagcccacaggagtatctctcgttcgccgtgccggtgacctggcgtcagcgcaccgagaactggtcctgggagctcggcgggtcggtgtcatggtcccattcgcgcacccagacgcaagcccgctatccgctgctgaacctgatcccgtccgactaccggcagcgcgccagcgagctgacggaggagggaagcagcagccatggattcggttacaccgccagagcgctggtggagcggcgggtgaccagcaactggttcgtcggcgccgcggtcgatattcagcaggcgaaggattacaccccgagccatgcgctgctttacgtccgctactcggcggccggctggcagggggatctggatatgccgccccagccgctggtgccctacgccgactggtag

SEQ ID NO: 6728 - protein, 1158 aa, Klebsiella pneumoniae
  misc_feature (796)..(796): Xaa can be any naturally occurring amino acid
MRKLSLSLLTLSLGVALLPLAQAATTPAQEHLLEQVRLGEASNREDLVRQSLYRLELIDPNNPELIAARMRYLLRQGDAAGAQKELERLTKLAPDSPELKASRNEMKSNTGEGRQALQQARLLGVAGKVDEAIAAYEKLYGGVPDDVDVAIEYWTLVARLPSRHSEGVSQLKKLNASAPGNVSLLTSLAKQMFADNKLQEGFAYLAEMARSASGRGIAADMWFSEVKSMPVSKASVQALQQFLLQFPTGSVAANARVLLDQQQAQLQDPTFRARSEGLAAVKSGNTTQAVADLQKAVQADSRDSDAVGALGQAYSQRGDRARAVAQLSKAIAMDPDSPNRGKWDSLLQTNRYWLLIKQGDNALKAGQLSQAQNYYAQAQRVDRTDSYAVLGLGDVAAARKEAAAERYYQQALRLDRGNNLAVRGLANLYRAESPEKASAWIAGLPPAQRRSIDDIERSLTNDRLEKQAQALESQGNWAQAAEVQRRRLALDPDSVWITYRLARDLVSAGERQEADALMRTMVNRQPQDAERVYASGLYLSGNDQDDLALAQIAALPRSAWTDNIRELEARLQSDRVLRQANQLRDSGDEAQAIALIKRQPASVRYDLTLADWAQQRGDSQTAIADYQRVLRQEADNGDARLGLAEVYLAEGDKPAARAQVMQLKGAETESMNMQRRVALARAGLGDTADAQRIFNQIVPQAKAQPPSMESALVLRDAARFATQSGAPQQALTHYREAMVASGITPAQPQDNDTFTRLTRNDSHDDWLKRGIRSDAADLYRQQDLNVTLEHDFWGSXGTGGYSDLKAHTTMLQVDAPLADGRMFFRTDLVNMDAGSFSTHSDGSYSPSWGTCGEIACTSGSKNQTDSGASVAVGWKNDTWSGDIGTTPMGFNVVDVVGGLSYSSDVGPVGYTVNVHRRPISSSLLSFGGQKDSSSHTGATWGGVRADGGGLSLSYDRGEAHGIWSSLGADSLTGKNVADNWRVRWMTGYYYKVINENNRRVTVGLNNMIWHYDKDLSGYTLGQGGYYSPQEYLSFAVPVTWRQRTENWSWELGGSVSWSHSRTQTQARYPLLNLIPSDYRQRASELTEEGSSSHGFGYTARALVERRVTSNWFVGAAVDIQQAKDYTPSHALLYVRYSAAGWQGDLDMPPQPLVPYADW

SEQ ID NO: 6729 - DNA, 1524 bp, Klebsiella pneumoniae
  misc_feature (1006)..(1006): n is a, c, g or t
ttgcgttcgctggtgggtgacctggtgctggtccgtctgcaggaagagcgggatcctcttctgcacaaacgcttatataacgcgctgcgccgcgcgatcctcgacggttcgctggcaccgcaaagccgtctgccgccgtcgcgggacctggcgggcgaacttggcgtatcaagaaacaccatattaacaacttatgaacaattgctggcggaaggatatgtggtttcccgtcggggaagcggaacattcgttgcccaaaccgcccctgagagctcattgacggctaaaggtcagcaagaaaacagcagtatcgcagcaccgacggcgcatctttcacgccgaggccaacatctgctcggccaggtcagcgccagcccgcgccagtggggagcgtttatacccggcgtgccggacgttaacgcctttccccacccgctgttcagtaagatccaggcccgcatcagccgtcggcccaaaccggagcggctcagctatagctgcaacggcggcactccggaactgcagcaggcgctggtggattatctgcgcgtgtcgcgcggcgtccactgtcagtcagatcaaattcttatcaccgaggggatccaccaggcgatcgatctggtcacccgcatgctgtgtgataacggcgatctggcgtgggtggaggagccttcctactgggggatccgccacgtgctggcgatgaacgacgttcgggcagagcccctgaccgtcgatgccaacggcctgtgcccgccggagacggttgacgatgcgccgaggctgatcttcgttacgccttcccaccagtatccgctgggcgcggtgatgagccttgagcgccgccagcggctgctggcgctcgcccgtcagcaggggagctggatcgtcgaagatgattatgacagcgagtttcgcttttccggtcagccgatccccgccctgcagggtctggtcgccgacgccccggtggtctatatcggcaccttcagcaagacgctctatnccggcctgcgcctgggctacgtggtgatcccgcggccgctggtcagcgacctgaagcacgcccatgctgagctttaccgcggcggccattcgctgatccagatggcgctggcggagtttattaccgccggccactattcggcccatatccgccgtatgcggctgctctacagccgtcgccgcgcctttttaactgagcttatccagcagcactgtatgccgtacgccctgtctgacttcagcgataatgccgggctgcatttgatcctcaatttgcccgcagaggctgacgatgtggcgatcgccagagaggccaatgcgcggcacattctggtgcggccgctgtcgcgctactacctgacggcggcgcgcaagaaaggattactgatgggattcgccagccagcccgaagagcagatggcgtcggcgttcagcgtcttactcggctgcctgcagacgcactgcccgcagatgctcctgctccgggaggacgcagaaaaacaaaacgccccaacctga

SEQ ID NO: 6730 - protein, 507 aa, Klebsiella pneumoniae
  misc_feature (336)..(336): Xaa can be any naturally occurring amino acid
MRSLVGDLVLVRLQEERDPLLHKRLYNALRRAILDGSLAPQSRLPPSRDLAGELGVSRNTILTTYEQLLAEGYVVSRRGSGTFVAQTAPESSLTAKGQQENSSIAAPTAHLSRRGQHLLGQVSASPRQWGAFIPGVPDVNAFPHPLFSKIQARISRRPKPERLSYSCNGGTPELQQALVDYLRVSRGVHCQSDQILITEGIHQAIDLVTRMLCDNGDLAWVEEPSYWGIRHVLAMNDVRAEPLTVDANGLCPPETVDDAPRLIFVTPSHQYPLGAVMSLERRQRLLALARQQGSWIVEDDYDSEFRFSGQPIPALQGLVADAPVVYIGTFSKTLYXGLRLGYVVIPRPLVSDLKHAHAELYRGGHSLIQMALAEFITAGHYSAHIRRMRLLYSRRRAFLTELIQQHCMPYALSDFSDNAGLHLILNLPAEADDVAIAREANARHILVRPLSRYYLTAARKKGLLMGFASQPEEQMASAFSVLLGCLQTHCPQMLLLREDAEKQNAPT

SEQ ID NO: 6731 - DNA, 741 bp, Klebsiella pneumoniae
  misc_feature (718)..(718): n is a, c, g or t
ttggagcgtattgaccacatcctggtcgtcgacgacgaccgcgacatccgggaactgattgtcgactatctggaaaaatcgggatatcgcgccagcggcgcggcgaacggaaaagccatgtggtcggtactcaaaaaccatcaaattgacctgattgtgctggatattatgatgccgggcgaggatggcttaacgctctgtcgccagctgcgcgccaacccgcagcaggatatcccggtgctgatgctcaccgcccgcaccgatgacagcgaccggatcctcggcctggaaatgggggctgacgattatctgattaagccctttgtggcccgcgaactgctggcgcgcatcaaagccattttacgccgcacccgggcgctgccgcccaacctgcagatcaccgaggcgggcaggctgatcgtctttggcgactggctgctcgataccgccgcccgtcatctgctggacgacagcggcgccatcgtcgccctcagcggggcggagtatcggctgctgcgggtgtttctcgaccatccccagcgggtgctgaaccgcgatcagctgctcaatctgacccagggacgcgacgcggaactgtttgagcggtcaattgacctgctggtgagccgactgcgccagcggctacgggaggatgctcgcgagccggcctacattaaaacggtgcgcagcgaaggctatgtgctgtcggtaccggtcnccattcgcgagaggcatgaatga

SEQ ID NO: 6732 - protein, 246 aa, Klebsiella pneumoniae
  misc_feature (240)..(240): Xaa can be any naturally occurring amino acid
MERIDHILVVDDDRDIRELIVDYLEKSGYRASGAANGKAMWSVLKNHQIDLIVLDIMMPGEDGLTLCRQLRANPQQDIPVLMLTARTDDSDRILGLEMGADDYLIKPFVARELLARIKAILRRTRALPPNLQITEAGRLIVFGDWLLDTAARHLLDDSGAIVALSGAEYRLLRVFLDHPQRVLNRDQLLNLTQGRDAELFERSIDLLVSRLRQRLREDAREPAYIKTVRSEGYVLSVPVXIRERHE

SEQ ID NO: 6733 - DNA, 1284 bp, Klebsiella oxytoca
  misc_feature (380)..(380): n is a, c, g or t
atgaacagcaataaagcaatgatggcgcgtcgcagcgacgcggtcccgcgcggcgtcggccagatccaccctatcttcgccgaacgcgcggagaactgccgggtgtgggacgtggaaggccgggaatatctcgattttgccggcggtatcgcggtgctcaataccggccacctgcatccgcaggttgtcgccgccgtcgaagaccagctgaaaaagctgtcgcatacctgcttccaggtgctggcctatgagccttatctggcgctgtgcgaaaagatgaatcaaaaggtgcccggtgatttcgccaagaaaaccctgctggtcaccaccgggtcggaagcggtggagaacgcggtgaagatcgcccgcgcggcaaccgngcgcagcggcgctatcgccttcaccggcgcctatcacggccgcacccattacaccctgtcgctgaccggcaaagtgaatccttactccgccggtatgggcttaatgccgggccatgtctatcgcgccctctacccatgcgcgctgcacggcgtcagtgatgacgaggcgatcgccagcatccatcgcatcttcaaaaacgatgccgcgccggaagatatcgccgccatcattattgagccggtgcagggtgaaggcgggttctatgccgcctccccggcctttatgcagcgcctgcgcgccctgtgcgacgagcacggcattatgctcatcgccgatgaggtccagagcggcgcgggccgcaccggtaccctgttcgccatggagcagatgggcgtcgcggcggatatcaccaccttcgccaaatccatcgccggcggtttcccgctggcgggcgtcaccggccgcgcggaggtgatggacgccatcgcccccggcggactgggcggcacctacgccggcaaccccatcgcctgcgccgccgccctggcggtattacagattttcgagcaggagaatctgctggaaaaagccaaccagctcggcgacaccctgcgccagggcctgctggcgatcgctgaagatcatccggagatcggcgacgtgcgcggtctgggggcgatgatcgccattgagctgtttgaagagggcgaccgcagcaggccgaacgccaggctgacggcggatatcgtcgcccgcgcccgcgacaaaggcctgatcctgctctcctgcgggccgtactacaacgtgctgcgcatcctggtgccgctgaccatcgaagaggcgcagatcgagcaggggctcaagatcatcgccgactgctttagcgaggcgaaacaggcatag

SEQ ID NO: 6734 - protein, 427 aa, Klebsiella oxytoca
  misc_feature (127)..(127): Xaa can be any naturally occurring amino acid
MNSNKAMMARRSDAVPRGVGQIHPIFAERAENCRVWDVEGREYLDFAGGIAVLNTGHLHPQVVAAVEDQLKKLSHTCFQVLAYEPYLALCEKMNQKVPGDFAKKTLLVTTGSEAVENAVKIARAATXRSGAIAFTGAYHGRTHYTLSLTGKVNPYSAGMGLMPGHVYRALYPCALHGVSDDEAIASIHRIFKNDAAPEDIAAIIIEPVQGEGGFYAASPAFMQRLRALCDEHGIMLIADEVQSGAGRTGTLFAMEQMGVAADITTFAKSIAGGFPLAGVTGRAEVMDAIAPGGLGGTYAGNPIACAAALAVLQIFEQENLLEKANQLGDTLRQGLLAIAEDHPEIGDVRGLGAMIAIELFEEGDRSRPNARLTADIVARARDKGLILLSCGPYYNVLRILVPLTIEEAQIEQGLKIIADCFSEAKQA

SEQ ID NO: 6735 - DNA, 459 bp, Klebsiella pneumoniae
  misc_feature (269)..(269): n is a, c, g or t
atgcaagcgcgtcgtaaaacccggctgtatatcgtgctggcggtgctcgccggcctcgggctaaccgtcagcctgacgctgtacgccctgagtagcaatatcgatctgttctacaccccgggggaaattatctacggtaaaacggaaacccgggcgctgccccataccggtcagcggctgcgggtggggggctacgttcagccgggctccctgcagcgcgacccgcaaactctcgacgtgcgctttaagctgtatgacgcccgcggggnggtggacgtcagctataagggcattctgccggacctgtttcgtgaagggcagggcgtggtggcccagggcgtgctggacggcgagcggcatattaccgcccagcaggtgctggccaaacatgatgaaaattacacgccgccggaggtgaaaaacgccatgacgccggagaaaacgggggcgcagccatga

SEQ ID NO: 6736 - protein, 152 aa, Klebsiella pneumoniae
  misc_feature (90)..(90): Xaa can be any naturally occurring amino acid
MQARRKTRLYIVLAVLAGLGLTVSLTLYALSSNIDLFYTPGEIIYGKTETRALPHTGQRLRVGGYVQPGSLQRDPQTLDVRFKLYDARGXVDVSYKGILPDLFREGQGVVAQGVLDGERHITAQQVLAKHDENYTPPEVKNAMTPEKTGAQP

SEQ ID NO: 6737 - DNA, 3141 bp, Morganella morganii
  misc_feature (607)..(607): n is a, c, g or t
atgtccggaaacaaccctgaaacccgtgccggcggcccgtcccgcctgtttattctgcgtccggtcgccaccagcctgtttatgctggcgatcctgctggcggggattgtcggttaccgcatgctgccggtttcgtcgctgccggaagtggattacccgactatccgcgtggtcacactctatcccggcgccagtccggatgtgatgacctccgccgtgaccgcgccgctggagcgccagttcgggcagatgtccggactgaaacagatgtcgtcgcaaagctcgggcggtgcctctgttattaccctgatgttccagctctccctgccgcttgatgtggcggtgcaggaagtgcaggcatccatcaacgcagcaaccaatctgctgccgaatgatctgccttatccgccgatttacagcaaggtgaacccggcagatccgccggtgctgacccttgccgtcacatctgatgccatgccgatgacgcggttgcaggatatggtggaaaaccgcatcgcccagaaaatctcccaggtggaaggggtcggtctggtgacactcgcgggcggccagcgccctgccgtacgggtgcagttaaatgccaatnctgtcgccgcttacgggctggacagcgaaactatccgcaccgcgattaacaacgccaacgtcaactccgccaaagggagccttgacggcccggcgcgttcggtaacgctgtccgccaacgaccagatgaaatcagcggaagattatcagaacctgattgtcagctacaaaaacaatgccccaatccgcctgcgggatgtggcaaccgtacaggaaggaccggaaaacacccaactgggtgcctgggttaatgataaacaggccattgtcatcaatgtgcagcgccagcccggcgcgaacgtgatttccaccaccgataccatccgtgctctgatcccggaactggtggaaaccctgccggaatccgtgaccgtaacggttctgactgaccggacagatgctatccgcgcctcagtcaaagatgtgcagtttgaactgtttttagcgatcgcgctggtgatcatggtgatgtatctgttcctgcgcaatatggctgcgaccctgataccgggagtggcagtaccgctctcgctggtcggtacgttcgcggtgatgtatttctgcggcttttccgtcaataacctgacactgatggcactgactatcgccaccgggtttgtggtagatgatgcaattgtggtggtggaaaacatcgcccgctatctggaaaaaggcgacaagccgctgaccgctgccctgaaaggtgccggtgaaatcggctttaccattatctcactgaccttctcgctgattgccgtgttaatccctctgttatttatgggggatattgtcggccgcctgtttcgtgagtttgccatcacccttgcggtggcgatcctgatttccggtgtggtgtcactgacactgacaccgatgatgtgcgcccggtttctgaaaccggaatccgctcaccgccataaccgctttaaccgcgccactgaacgcttttttgagcgggtgattgccggttacggccgctggctgacatgggtgctgcgccatcagtggctgacactcggggttgcgttcagtaccatggcgatcaccgtcatgctctatctgtttattccgaaaggctttttcccgatccaggataacggactgattcagggcaccctggaagcgccgcagtccgtgtcgtttcaggccatgagtgagaaacagcaggcggtcagccgtctgctggcagatgacccggcagttgctaatattgccgcctttgccggtatcgacggcagcaatgccacactgaacaccggccgtctgcaaatcaccctgaaaccgctgtctgagcgggctgaccgcgcggaagctatcatcacccggttacaggaaaaggccgataccctgcccggagtgaaactgtatctccagccgtctcaggatctgacaattgatacccagacctcccgcacgcagtatcagtttaccttacaggccaattccctggaggagctggatctgtgggtgccgcgtctgatgacagaattagagagcagtgatgccctgaccgacaccggcaatgactggcagaataagggactggtggcctatatcgatattgatcgcgacaccgcgtcacggctggggctgaccatgaccaacattgataacgcgctgtacaatgcgttcggtcagcggctgatctccacgatttatacccaggccagtcagtaccgcgtggtgctggaaaataacacgtcgctgacaccgggggcggatgcactgaacagtatccgtctgaccaataaagacggcaattctgtgccgttgtcagcctttgccactgtctcgcagcgcttcgggccgctggcgatcaatcatctggcacagttcccgtccgctaccttctcctttaatatcccggcaggcggttcactggaagcggctgttaatgcggtaaaatcagcggagcagcgtatcggcctgccgaaggatatcaccacacaattccagggtgccactctcgcctttgaaaatgccctgtccaacaccctgtggctgatccttgccgctgtcgtggcgatgtatattgtgctcggcattctgtatgagagttttattcacccgattactatcctctccaccctgcccactgccggggtcggtgccctgctggcactgattatggcgggtaatgagctggatgtgatcgcgattatcggtattattctgctgatcgggattgtgaagaaaaacgccattatgatgattgacttcgcccttgcggcagagcgcgaacaggggctgtcgccgtatgatgcgatttatcaggcgtgtcttctgcgtttccgcccgatcctgatgaccaccatggccgcgctgtttggtgcggtgccgctgatgctcagtaccggggtcggtgccgagctgcgccagccactgggggtctgtatggtcggcgggctgattatgagccagatcctgaccctctttaccacaccggtgatttacctgctgtttgaccgcctgtctcactggcgcgataacgcccgctttaccccggaaagtgacaacacgggagcctcatcatga

SEQ ID NO: 6738 - protein, 1046 aa, Morganella morganii
  misc_feature (203)..(203): Xaa can be any naturally occurring amino acid
MSGNNPETRAGGPSRLFILRPVATSLFMLAILLAGIVGYRMLPVSSLPEVDYPTIRVVTLYPGASPDVMTSAVTAPLERQFGQMSGLKQMSSQSSGGASVITLMFQLSLPLDVAVQEVQASINAATNLLPNDLPYPPIYSKVNPADPPVLTLAVTSDAMPMTRLQDMVENRIAQKISQVEGVGLVTLAGGQRPAVRVQLNANXVAAYGLDSETIRTAINNANVNSAKGSLDGPARSVTLSANDQMKSAEDYQNLIVSYKNNAPIRLRDVATVQEGPENTQLGAWVNDKQAIVINVQRQPGANVISTTDTIRALIPELVETLPESVTVTVLTDRTDAIRASVKDVQFELFLAIALVIMVMYLFLRNMAATLIPGVAVPLSLVGTFAVMYFCGFSVNNLTLMALTIATGFVVDDAIVVVENIARYLEKGDKPLTAALKGAGEIGFTIISLTFSLIAVLIPLLFMGDIVGRLFREFAITLAVAILISGVVSLTLTPMMCARFLKPESAHRHNRFNRATERFFERVIAGYGRWLTWVLRHQWLTLGVAFSTMAITVMLYLFIPKGFFPIQDNGLIQGTLEAPQSVSFQAMSEKQQAVSRLLADDPAVANIAAFAGIDGSNATLNTGRLQITLKPLSERADRAEAIITRLQEKADTLPGVKLYLQPSQDLTIDTQTSRTQYQFTLQANSLEELDLWVPRLMTELESSDALTDTGNDWQNKGLVAYIDIDRDTASRLGLTMTNIDNALYNAFGQRLISTIYTQASQYRVVLENNTSLTPGADALNSIRLTNKDGNSVPLSAFATVSQRFGPLAINHLAQFPSATFSFNIPAGGSLEAAVNAVKSAEQRIGLPKDITTQFQGATLAFENALSNTLWLILAAVVAMYIVLGILYESFIHPITILSTLPTAGVGALLALIMAGNELDVIAIIGIILLIGIVKKNAIMMIDFALAAEREQGLSPYDAIYQACLLRFRPILMTTMAALFGAVPLMLSTGVGAELRQPLGVCMVGGLIMSQILTLFTTPVIYLLFDRLSHWRDNARFTPESDNTGASS

SEQ ID NO: 6739 - DNA, 1635 bp, Citrobacter koseri
  misc_feature (500)..(500): n is a, c, g or t
atgttcaggccagcaaaattttcccgttccgcacttcttgcagggacgtttttcacgttttcttcactgttttgtgcaacggcggcggagatccccgcaggaacacagctggcaaaagaacaatctgtttatcgtcatctgaaggatgaacccgcgtctctggatccgattaaagcggtcggtctgaccgaagcccagattttgcgtgatttatttgaagggctgaccagccagggtgcggacggcaaaccggtgcccggtgtcgctctctcctgggagacccgcaacaatcaggtatggacattccgcctgcgtgacgatgcccgctggtcagacggctcaccggtgaccgcacaggactttgtctacagctggcagcgcctggtgaacccgaaaaatctctctaccttcgcctggtttgcaccgctggccgggattaaaaatgcacaggcgattattgacggaaaaatgctgccgaaaaccctcggcgttgaagctgntgacagccggacactgcgggttacgttagaccgtcctgtgccgtatttcccgggcctggcggccaatttcagccttttcccggtcaatcgtgctgctgttgagaaatatggcgacagctggatccgcacagggcatctggtcggcaacggggcatttgtcctgcatgaccgggtggtgaatgagaaaattgttctgacaccgaacccgtattactgggatcacaaacacacggtgctgacatcggttacctttgtaccgattaaccatgaatcccaggccaccaaacgctatctgtccaatgacctcgatatcacagagtctttcccgaaaaaccagtatcagaaactgaaacaggcgattccggatcagatttatatcccggatcagctcggcacctattattatgcctttaacacacagcgtgcaccgacaaacgacccgcgtgtgcggcaggcgctttccatgaccattgaccgcgcagtgatcgcagagaaagtgctgggtacaggcgaaaaaccggcctggcatttcacgccggatgtcaccgccgggtttacaccggaaccgggtctgtaccagaaatttacacaggatgagctcgacagccaggcgaaaaccctgctggccgccgccggttacgggccgcataatccgctgaaattatccctgctgtataacagttcggaaaaccatcagaaaattgccattgccgtcggttcgatgtggaagaaaaaactgggcgcggaagtgaaactggtcaatcaggaatggaaaacctatatcgacagccgcaataccggcaattttgatgtgatccgcgcctcctgggtcggggattacaacgagccgtcaaccttcctgtctctgctgaccagtacacacagcggcaatatcgcgcagtatcataatgaaaaatatgacgctttgctgaaaaccgctgcgctggaaacagatgataacgcccgtaataccgactataacgacgccgaaaaactgctggcggaagacatgccgatagcaccaatctaccagtacactaacggccgtctgattaaaccgtggctgaagggatatccggtcaataatccggaagatgtggcatacagccataatctctatattattaaacactaa

SEQ ID NO: 6740 - protein, 544 aa, Citrobacter koseri
  misc_feature (167)..(167): Xaa can be any naturally occurring amino acid
MFRPAKFSRSALLAGTFFTFSSLFCATAAEIPAGTQLAKEQSVYRHLKDEPASLDPIKAVGLTEAQILRDLFEGLTSQGADGKPVPGVALSWETRNNQVWTFRLRDDARWSDGSPVTAQDFVYSWQRLVNPKNLSTFAWFAPLAGIKNAQAIIDGKMLPKTLGVEAXDSRTLRVTLDRPVPYFPGLAANFSLFPVNRAAVEKYGDSWIRTGHLVGNGAFVLHDRVVNEKIVLTPNPYYWDHKHTVLTSVTFVPINHESQATKRYLSNDLDITESFPKNQYQKLKQAIPDQIYIPDQLGTYYYAFNTQRAPTNDPRVRQALSMTIDRAVIAEKVLGTGEKPAWHFTPDVTAGFTPEPGLYQKFTQDELDSQAKTLLAAAGYGPHNPLKLSLLYNSSENHQKIAIAVGSMWKKKLGAEVKLVNQEWKTYIDSRNTGNFDVIRASWVGDYNEPSTFLSLLTSTHSGNIAQYHNEKYDALLKTAALETDDNARNTDYNDAEKLLAEDMPIAPIYQYTNGRLIKPWLKGYPVNNPEDVAYSHNLYIIKH

SEQ ID NO: 6741 - DNA, 1635 bp, Morganella morganii
  misc_feature (506)..(506): n is a, c, g or t
atgttcaggccagcaaaattttcccgttccgcacttcttgcagggacgtttttcacgttttcttcactgttttgtgcaacggcggcggagatccccgcaggaacacagctggcaaaagaacaatctgtttatcgtcatctgaaggatgaacccgcgtctctggatccgattaaagcggtcggtctgaccgaagcccagattttgcgtgatttatttgaagggctgaccagccagggtgcggacggcaaaccggtgcccggtgtcgctctctcctgggagacccgcaacaatcaggtatggacattccgcctgcgtgacgatgcccgctggtcagacggctcaccggtgaccgcacaggactttgtctacagctggcagcgcctggtgaacccgaaaaatctctctaccttcgcctggtttgcaccgctggccgggattaaaaatgcacaggcgattattgacggaaaaatgctgccgaaaaccctcggcgttgaagctgctgacanccggacactgcgggttacgttagaccgtcctgtgccgtatttcccgggcctggcggccaatttcagccttttcccggtcaatcgtgctgctgttgagaaatatggcgacagctggatccgcacagggcatctggtcggcaacggggcatttgtcctgcatgaccgggtggtgaatgagaaaattgttctgacaccgaacccgtattactgggatcacaaacacacggtgctgacatcggttacctttgtaccgattaaccatgaatcccaggccaccaaacgctatctgtccaatgacctcgatatcacagagtctttcccgaaaaaccagtatcagaaactgaaacaggcgattccggatcagatttatatcccggatcagctcggcacctattattatgcctttaacacacagcgtgcaccgacaaacgacccgcgtgtgcggcaggcgctttccatgaccattgaccgcgcagtgatcgcagagaaagtgctgggtacaggcgaaaaaccggcctggcatttcacgccggatgtcaccgccgggtttacaccggaaccgggtctgtaccagaaatttacacaggatgagctcgacagccaggcgaaaaccctgctggccgccgccggttacgggccgcataatccgctgaaattatccctgctgtataacagttcggaaaaccatcagaaaattgccattgccgtcggttcgatgtggaagaaaaaactgggcgcggaagtgaaactggtcaatcaggaatggaaaacctatatcgacagccgcaataccggcaattttgatgtgatccgcgcctcctgggtcggggattacaacgagccgtcaaccttcctgtctctgctgaccagtacacacagcggcaatatcgcgcagtatcataatgaaaaatatgacgctttgctgaaaaccgctgcgctggaaacagatgataacgcccgtaataccgactataacgacgccgaaaaactgctggcggaagacatgccgatagcaccaatctaccagtacactaacggccgtctgattaaaccgtggctgaagggatatccggtcaataatccggaagatgtggcatacagccataatctctatattattaaacactaa

SEQ ID NO: 6742 - protein, 544 aa, Morganella morganii
  misc_feature (169)..(169): Xaa can be any naturally occurring amino acid
MFRPAKFSRSALLAGTFFTFSSLFCATAAEIPAGTQLAKEQSVYRHLKDEPASLDPIKAVGLTEAQILRDLFEGLTSQGADGKPVPGVALSWETRNNQVWTFRLRDDARWSDGSPVTAQDFVYSWQRLVNPKNLSTFAWFAPLAGIKNAQAIIDGKMLPKTLGVEAADXRTLRVTLDRPVPYFPGLAANFSLFPVNRAAVEKYGDSWIRTGHLVGNGAFVLHDRVVNEKIVLTPNPYYWDHKHTVLTSVTFVPINHESQATKRYLSNDLDITESFPKNQYQKLKQAIPDQIYIPDQLGTYYYAFNTQRAPTNDPRVRQALSMTIDRAVIAEKVLGTGEKPAWHFTPDVTAGFTPEPGLYQKFTQDELDSQAKTLLAAAGYGPHNPLKLSLLYNSSENHQKIAIAVGSMWKKKLGAEVKLVNQEWKTYIDSRNTGNFDVIRASWVGDYNEPSTFLSLLTSTHSGNIAQYHNEKYDALLKTAALETDDNARNTDYNDAEKLLAEDMPIAPIYQYTNGRLIKPWLKGYPVNNPEDVAYSHNLYIIKH

SEQ ID NO: 6743 - DNA, 603 bp, Citrobacter koseri
  misc_feature (250)..(250): n is a, c, g or t
gtgatcagtgtgttgcgtcattgtctgctgttgctctgtttttttgcctccgccgtgtacgcgtggcagccgcagcagggcgatattattttccatacctcgcgctcctctcagagcctcgctatacaaaaagcgacagggtcggtctacagccatatggggattattctgctgcgtgacggtaagccgtatgtgtatgaggcggcaaaaacagtccgctttacaccgctgaaacagtggattgcgcgcngcaccggtaaccattacgtggtgaaacgcctgaaaaatcaactgagtgcatcacagcagcaggcattgtaccgtgaagcgatccggtatcagtcccagccttatgacctgacattttcatgggatgatgagcggatttattgttcggaactggtctggaaaatctataaaaatgccctgaatacagaggtcggtcagttacagacattacgggaatttgatttatcctcgccggaagtacaggcaaagatgaaagaacggtacggaaaggcagttccgctggatgaaacggtgatttcgccggtggctatgtttgattcgccgctgctgacaacggtatatgaaagccggtaa

SEQ ID NO: 6744 - protein, 200 aa, Citrobacter koseri
  misc_feature (84)..(84): Xaa can be any naturally occurring amino acid
MISVLRHCLLLLCFFASAVYAWQPQQGDIIFHTSRSSQSLAIQKATGSVYSHMGIILLRDGKPYVYEAAKTVRFTPLKQWIARXTGNHYVVKRLKNQLSASQQQALYREAIRYQSQPYDLTFSWDDERIYCSELVWKIYKNALNTEVGQLQTLREFDLSSPEVQAKMKERYGKAVPLDETVISPVAMFDSPLLTTVYESR

SEQ ID NO: 6745 - DNA, 1863 bp, Morganella morganii
  misc_feature (772)..(772): n is a, c, g or t
atgcatactttatggactatcattgccggaatatttaaatggagctggcgtatactgaattttgtacgtcagcttgtcgccaatgtcctttttatcatcatactgctgttagccgccggggcctatgcactgctgagtgagcaggatactcagaccagtcgtgaacccggagcattatatgtaaatctttccggtgttgtcgtcgatcagctgacccgtaacagtccgctggaaagcctctcgctccagctgcttggcgcatcttccggtcagttacaggaaaactccctgtttgatgtggtggaaactatccgtactgccgccaccgacccggatattaccggaatgatcctgaagctggatgatttcgttggtgccgaccagccgtcacttcagtatatcggtaaaaccatcacagaattccgcaaacagggcaaacgggtctatgctgtcagcggaaactataaccaggctcagtattacctggcatcctatgcagacaagatatacatgccgccgcagggcagcgtcggtatctacggcttcgccaccaatacgctgtattataacgaattgctggaaatgctgaaggtgaaaacccatatcttccgcgtcggtacctataaatcggcggttgagccgatgctgcgcaacgatatgtcaccggaagcccgcgaatccacacagcgttttatcagtgtgctgtgggataactatctcaccagtctcgcggaaaaccgtaaaaccggtaagaacaccattttcccgggcncacagcagatgctggctctgatgaaaacggcaaaaggtgataatgccgcttatgccgtcacgcaaaaactggttgatgaaatcatgccggctaacgtgtttgaatcagaaatggccaaaactttcggctgggataagaaaaacaacacaatcaatgcgattccgtttgccgaatatgccaaaaacctgaatatcggcgtgccgcagggcaagaccaccggtaacatcgccgtggttgtggttcagggtgctatcgttgacggcccggatgcccccggcatggccggcagtgatactatcgccgcacagctccgcgaagcccgtctggatccggaagtgaaagcgctggtactgcgggtgaacagcccgggcggcagtgtgacggcatcggagcagatccgtgcggaagtcgcagcactgaaacagagcggcaaagccgtggtggtttccatgggcggagtagcagcttccggcggttactgggtctcaacaccggcaaactacattgttgcctcaccgagcaccattaccggctccatcggtattttcggcgtggtcaccacgtttgaggactctctgagcgaaatcggtgtacacactgacggcgtgtccacctcgccgctggccgatgccaccgtaaccaaagcactgacaccggaattctcagagctgatgcagctctatattgaaagcggctacagcaattttattaatctcgttgccaagtcccgtcacaagacgccggaggaagtggataaaattgcgcagggtcgtgtctgggtcggttcagatgccaaagctaacggtctggtcgacaaacttggtgattttgatgacgcagttgccaaagccgcagagctggcctctgttgagcatccggtactgaactggatgcagccggaaatgacattcattgacagactgctcgcggaaacggccggcaatgtgaaggtgacactgccgtcatcattgcagggactgatcccggcgccggtcggcgcacaactgacacaacaggcatcctttatgaaaatgctgacggatccgcagtaccgctatgcgttctgtctgaattgtaccaatattcagtaa

SEQ ID NO: 6746 - protein, 620 aa, Morganella morganii
  misc_feature (258)..(258): Xaa can be any naturally occurring amino acid
MHTLWTIIAGIFKWSWRILNFVRQLVANVLFIIILLLAAGAYALLSEQDTQTSREPGALYVNLSGVVVDQLTRNSPLESLSLQLLGASSGQLQENSLFDVVETIRTAATDPDITGMILKLDDFVGADQPSLQYIGKTITEFRKQGKRVYAVSGNYNQAQYYLASYADKIYMPPQGSVGIYGFATNTLYYNELLEMLKVKTHIFRVGTYKSAVEPMLRNDMSPEARESTQRFISVLWDNYLTSLAENRKTGKNTIFPGXQQMLALMKTAKGDNAAYAVTQKLVDEIMPANVFESEMAKTFGWDKKNNTINAIPFAEYAKNLNIGVPQGKTTGNIAVVVVQGAIVDGPDAPGMAGSDTIAAQLREARLDPEVKALVLRVNSPGGSVTASEQIRAEVAALKQSGKAVVVSMGGVAASGGYWVSTPANYIVASPSTITGSIGIFGVVTTFEDSLSEIGVHTDGVSTSPLADATVTKALTPEFSELMQLYIESGYSNFINLVAKSRHKTPEEVDKIAQGRVWVGSDAKANGLVDKLGDFDDAVAKAAELASVEHPVLNWMQPEMTFIDRLLAETAGNVKVTLPSSLQGLIPAPVGAQLTQQASFMKMLTDPQYRYAFCLNCTNIQ

SEQ ID NO: 6747 - DNA, 1863 bp, Morganella morganii
  misc_feature (169)..(169): n is a, c, g or t
atgcatactttatggactatcattgccggaatatttaaatggagctggcgtatactgaattttgtacgtcagcttgtcgccaatgtcctttttatcatcatactgctgttagccgccggggcctatgcactgctgagtgagcaggatactcagaccagtcgtgaacccngagcattatatgtaaatctttccggtgttgtcgtcgatcagctgacccgtaacagtccgctggaaagcctctcgctccagctgcttggcgcatcttccggtcagttacaggaaaactccctgtttgatgtggtggaaactatccgtactgccgccaccgacccggatattaccggaatgatcctgaagctggatgatttcgttggtgccgaccagccgtcacttcagtatatcggtaaaaccatcacagaattccgcaaacagggcaaacgggtctatgctgtcagcggaaactataaccaggctcagtattacctggcatcctatgcagacaagatatacatgccgccgcagggcagcgtcggtatctacggcttcgccaccaatacgctgtattataacgaattgctggaaatgctgaaggtgaaaacccatatcttccgcgtcggtacctataaatcggcggttgagccgatgctgcgcaacgatatgtcaccggaagcccgcgaatccacacagcgttttatcagtgtgctgtgggataactatctcaccagtctcgcggaaaaccgtaaaaccggtaagaacaccattttcccgggcgcacagcagatgctggctctgatgaaaacggcaaaaggtgataatgccgcttatgccgtcacgcaaaaactggttgatgaaatcatgccggctaacgtgtttgaatcagaaatggccaaaactttcggctgggataagaaaaacaacacaatcaatgcgattccgtttgccgaatatgccaaaaacctgaatatcggcgtgccgcagggcaagaccaccggtaacatcgccgtggttgtggttcagggtgctatcgttgacggcccggatgcccccggcatggccggcagtgatactatcgccgcacagctccgcgaagcccgtctggatccggaagtgaaagcgctggtactgcgggtgaacagcccgggcggcagtgtgacggcatcggagcagatccgtgcggaagtcgcagcactgaaacagagcggcaaagccgtggtggtttccatgggcggagtagcagcttccggcggttactgggtctcaacaccggcaaactacattgttgcctcaccgagcaccattaccggctccatcggtattttcggcgtggtcaccacgtttgaggactctctgagcgaaatcggtgtacacactgacggcgtgtccacctcgccgctggccgatgccaccgtaaccaaagcactgacaccggaattctcagagctgatgcagctctatattgaaagcggctacagcaattttattaatctcgttgccaagtcccgtcacaagacgccggaggaagtggataaaattgcgcagggtcgtgtctgggtcggttcagatgccaaagctaacggtctggtcgacaaacttggtgattttgatgacgcagttgccaaagccgcagagctggcctctgttgagcatccggtactgaactggatgcagccggaaatgacattcattgacagactgctcgcggaaacggccggcaatgtgaaggtgacactgccgtcatcattgcagggactgatcccggcgccggtcggcgcacaactgacacaacaggcatcctttatgaaaatgctgacggatccgcagtaccgctatgcgttctgtctgaattgtaccaatattcagtaa

SEQ ID NO: 6748 - protein, 620 aa, Morganella morganii
  misc_feature (57)..(57): Xaa can be any naturally occurring amino acid
MHTLWTIIAGIFKWSWRILNFVRQLVANVLFIIILLLAAGAYALLSEQDTQTSREPXALYVNLSGVVVDQLTRNSPLESLSLQLLGASSGQLQENSLFDVVETIRTAATDPDITGMILKLDDFVGADQPSLQYIGKTITEFRKQGKRVYAVSGNYNQAQYYLASYADKIYMPPQGSVGIYGFATNTLYYNELLEMLKVKTHIFRVGTYKSAVEPMLRNDMSPEARESTQRFISVLWDNYLTSLAENRKTGKNTIFPGAQQMLALMKTAKGDNAAYAVTQKLVDEIMPANVFESEMAKTFGWDKKNNTINAIPFAEYAKNLNIGVPQGKTTGNIAVVVVQGAIVDGPDAPGMAGSDTIAAQLREARLDPEVKALVLRVNSPGGSVTASEQIRAEVAALKQSGKAVVVSMGGVAASGGYWVSTPANYIVASPSTITGSIGIFGVVTTFEDSLSEIGVHTDGVSTSPLADATVTKALTPEFSELMQLYIESGYSNFINLVAKSRHKTPEEVDKIAQGRVWVGSDAKANGLVDKLGDFDDAVAKAAELASVEHPVLNWMQPEMTFIDRLLAETAGNVKVTLPSSLQGLIPAPVGAQLTQQASFMKMLTDPQYRYAFCLNCTNIQ

SEQ ID NO: 6749 - DNA, 477 bp, Morganella morganii
  misc_feature (284)..(284): n is a, c, g or t
atgtctcattttacagataccgatccctgcccgtgcggcagcggggatacttttgcacagtgttgccagccttatctttccggtgcgcagtccgcccccgatgcgcgggcactgatgtgttcgcgttacagtgcgtttgtcacccataatgctgatcatctgatccggacatggtatccgccggcatgcgcggaagcactgcggacagaactgaccgccggattcggtgaaacggaatggctgggactgaatgtcattgattttcagcccggcaccgcgccggncgaggctttcgttgaattttgtgcttgctttattgataaaaagtccgaagataaacaattcattcacgaacgttcccgttttcgcctgactgacggtgcctggatgtacctcgacggcgtaaaaccacagatcggccgtaatgacccctgcccctgcggctccggaaaaaaatataaaaaatgctgtgcctga

SEQ ID NO: 6750 - protein, 158 aa, Morganella morganii
  misc_feature (95)..(95): Xaa can be any naturally occurring amino acid
MSHFTDTDPCPCGSGDTFAQCCQPYLSGAQSAPDARALMCSRYSAFVTHNADHLIRTWYPPACAEALRTELTAGFGETEWLGLNVIDFQPGTAPXEAFVEFCACFIDKKSEDKQFIHERSRFRLTDGAWMYLDGVKPQIGRNDPCPCGSGKKYKKCCA

SEQ ID NO: 6751 - DNA, 825 bp, Morganella morganii
  misc_feature (637)..(637): n is a, c, g or t
atgacattactgccgaaaatccgccgttccccgtccgcgctgacgggcaccctgattattctgtttctgctgctggtggcgttgtttgcgccgtggctcgccccttatgacccggtactgcaaaacccggcacagcgcctgctggcaccggatgctcaacactggctcggaaccgacagctacgggcgtgatgtgctctcccgcctgatctacggcacccgcccgatgtttggtctggttgcactggtcgcagcaatcaccctgcccgccgggttattgatcggcattctggccggattttacggtcgctgggtggaaacgattctgatgcgctttaccgatattgtcatgtcgatgccgcgcctgatcctcgcatttgcctttgttgccattctcgggccggggctgattaacggcgcactggcactcgccctgacctcgtggccggcctatgcccgccaggcacgcagtgaaatccgccatctgcgcaacagtgattatctggccagtgcggaaatgctggggatccgtggtctgcgtctgctgtggggacacattctgccgctctgtctgccgtcagctattgtccggctggcgctggatctcgccaccattatcctggcagccgccggtctgngtttcctcgggctgggcgcacaaccgccgatggcggaatggggagccatgattgccgatggtatgcaggttattttcgaccagtggtggatagccgccgttcccggcgcggccattctgattgccggtatggcattcaatcttctgggtgatggtttacgggatattatggagccgcaacatgactga

SEQ ID NO: 6752 - protein, 274 aa, Morganella morganii
  misc_feature (213)..(213): Xaa can be any naturally occurring amino acid
MTLLPKIRRSPSALTGTLIILFLLLVALFAPWLAPYDPVLQNPAQRLLAPDAQHWLGTDSYGRDVLSRLIYGTRPMFGLVALVAAITLPAGLLIGILAGFYGRWVETILMRFTDIVMSMPRLILAFAFVAILGPGLINGALALALTSWPAYARQARSEIRHLRNSDYLASAEMLGIRGLRLLWGHILPLCLPSAIVRLALDLATIILAAAGLXFLGLGAQPPMAEWGAMIADGMQVIFDQWWIAAVPGAAILIAGMAFNLLGDGLRDIMEPQHD

SEQ ID NO: 6753 - DNA, 1347 bp, Citrobacter koseri
  misc_feature (596)..(596): n is a, c, g or t
atgaagacgtatagtctgcgcctgcggctgggcgggttattgctgctgctcaccctgctgacctggggtgtcgccagtgtgttcgcctggatgcagaccacaaaatccatcaatgaattattcgatacacaacaaatggcctttgccaaacgtctgtcagttttgccgtccgggctcgagttcccgccgtcggcgatacagaaaaccaaaaaaatgctctccggcaaccggggaaagcaggatgacgatgcattcgcttttgctatttttagtccgtcgggcgagcgggtgctggatgacggcgaaaacggccggaaaattccgttctctgacaagaaaaacgggttccgtgacggttcactgacggatgataacgaccgctggcgctttgtacagctgccttccgccgatggccgctacatcatcgtggtcggccaggagtgggaataccgcgaggatatggggctgaccattatcaccgctcaggcgatcccgtggctggtggctctgccgctgatgctgcttctgttcctgtggctgctgacccgcgcactgaccccgctgcgcctgctggcccggcagttacagcgccgtantccggcagagctgacgccgcttgccccgccggtgctgccgaaagaagtcagcccgatgctggacgctctgaacggattatttctgcgtatccgcgatctgcgcgaacgggaaagccgctttacctctgatgccgcccatgaactgcgcagcccgctggccgcgctgaaagtacagactgaagtaatgcagattgccggggatgaccccgccacccgtgaacacgtgaccgcgaatctgatcaccgggattgaccgcgccacccgtctggtggatcagttactgaccctctcacggctggaatcacagtctcacccgcaggaatgtacagagctgcgctggtcagccattattaatgatgccattgcacaaacagctccggatgcggctgtacatcaggtcagtgtgatacctgacctcaccgcgcctgaactgacggtccgcggcgaacaactgctgctgaccgtcatgctgcgcaatctgctgcataatgctatccgctacggcaaaaccggcggcaccgttcatctgacgctgacaccgcagcagttagtgattgaggatgatggtccgggcgtcagtgatacgatactggcccggctgggagaacgtttttaccggccgccgggacaggaaaaaaccggcagcggtctgggattgtctatcgtgaaacggattgcggaactgcatcatatgaccatacagttccgtcgcagcccgcagggcgggtttattgctgagatcaggtggtga

SEQ ID NO: 6754 - protein, 448 aa, Citrobacter koseri
  misc_feature (199)..(199): Xaa can be any naturally occurring amino acid
MKTYSLRLRLGGLLLLLTLLTWGVASVFAWMQTTKSINELFDTQQMAFAKRLSVLPSGLEFPPSAIQKTKKMLSGNRGKQDDDAFAFAIFSPSGERVLDDGENGRKIPFSDKKNGFRDGSLTDDNDRWRFVQLPSADGRYIIVVGQEWEYREDMGLTIITAQAIPWLVALPLMLLLFLWLLTRALTPLRLLARQLQRRXPAELTPLAPPVLPKEVSPMLDALNGLFLRIRDLRERESRFTSDAAHELRSPLAALKVQTEVMQIAGDDPATREHVTANLITGIDRATRLVDQLLTLSRLESQSHPQECTELRWSAIINDAIAQTAPDAAVHQVSVIPDLTAPELTVRGEQLLLTVMLRNLLHNAIRYGKTGGTVHLTLTPQQLVIEDDGPGVSDTILARLGERFYRPPGQEKTGSGLGLSIVKRIAELHHMTIQFRRSPQGGFIAEIRW

SEQ ID NO: 6755 - DNA, 807 bp, Citrobacter koseri
  misc_feature (29)..(29): n is a, c, g or t
atgagccggtatgaacaactttttcagcntttgcagtcccgcaaccagggtgcgtttatcccgtttgtcaccctcggtgatccgtccgctgaggtttccctgcaaattattgatgctctggtggccggtggtgctgatgccctggaaatcggtattccgttttctgacccgctggcagacggcccggtaattcaggacgctaacctccgtgcctttgcggccggtatgaccccggcacgctgctttgagctgattgcacaaatccgtgcaaaatacccggaactgccggtaggactgctgatgtatgccaatctggttttccataacggtatcagtcagttttatgaaacagcggcaaaagccggggtggattcggtgctgattgccgatgtgccgcttcatgagtctcagccgttccgggatgctgcgctggccagtaatatcgcaccggtctttatctgtccgccggatgcggatgataaattactggaaacactggccgccgccggaaaaggctatacctacctgctctcccgtgccggggtgacaggaacagaaaagcgggctgaaaagtccctggctgatctgacggcaaaactgaccgcgctgaatgccgcaccgccggttcagggattcgggatttccgaaccggaacaggtacaggaatcactgcgaaatggtgcagcaggggcaatctccggctcggctgtggtaaaaatcatcgccgcaaatctggataatgtaccggtgatgtgtcagaaactgcgggaatttacgcagaaaatgaaaaacgcaacgcaattataa

SEQ ID NO: 6756 - protein, 268 aa, Citrobacter koseri
  misc_feature (10)..(10): Xaa can be any naturally occurring amino acid
MSRYEQLFQXLQSRNQGAFIPFVTLGDPSAEVSLQIIDALVAGGADALEIGIPFSDPLADGPVIQDANLRAFAAGMTPARCFELIAQIRAKYPELPVGLLMYANLVFHNGISQFYETAAKAGVDSVLIADVPLHESQPFRDAALASNIAPVFICPPDADDKLLETLAAAGKGYTYLLSRAGVTGTEKRAEKSLADLTAKLTALNAAPPVQGFGISEPEQVQESLRNGAAGAISGSAVVKIIAANLDNVPVMCQKLREFTQKMKNATQL

SEQ ID NO: 6757 - DNA, 636 bp, Morganella morganii
  misc_feature (172)..(172): n is a, c, g or t
atgtcagatctctttgctcacgatgaaccgcttgcagtggcacccgatgcgtatctgcttaaaggttttctcagtgatgaggatgagatgctgctggcagaaatccgtcgcctgactgccatttcaccgttccgccacatgcagacgcccggcggataccggatgtctgcgnccatgagcagctgcggcacatacggctggatctccgatgccagaggttaccgctactcacaaacagatccgctgaccggcaatccgtggccgccgctgccggatgcgtttttgtcactgtcgcagcaggcggcggagcgggcgggctttcacggattttcgccggacagctgtctgattaactgttacgcgccgggcgccggtatgtctctgcatcaggacagggatgagccggatcgccgccagccgattgtgtcattttcactcggtctgccggtgcagtttcagttcggcggcagtgagcggcatcatcccctgaaaacctttgcgcttgagcacggtgatgtactggtgtggggcggccgttcccgtctgaattaccatgctgtccgtccggtaagggccggagtgcatccgcttgcgggtgcccggcggtttaatctgaccttccgctgcgcgcggtaa

SEQ ID NO: 6758 - protein, 211 aa, Morganella morganii
  misc_feature (58)..(58): Xaa can be any naturally occurring amino acid
MSDLFAHDEPLAVAPDAYLLKGFLSDEDEMLLAEIRRLTAISPFRHMQTPGGYRMSAXMSSCGTYGWISDARGYRYSQTDPLTGNPWPPLPDAFLSLSQQAAERAGFHGFSPDSCLINCYAPGAGMSLHQDRDEPDRRQPIVSFSLGLPVQFQFGGSERHHPLKTFALEHGDVLVWGGRSRLNYHAVRPVRAGVHPLAGARRFNLTFRCAR

SEQ ID NO: 6759 - DNA, 1191 bp, Morganella morganii
  misc_feature (205)..(205): n is a, c, g or t
atgccgcgttctgtttactggctctcagccgccttagccttatttaccaccgggaatgccctggtgctctctgttgccgttcttatcggctcacaactggcggacgatccggcacatgccacgatcccgctgctggcacaatatatcggcctgatttccgcctcggtgccgatggctcactttatgatgcgtttcggccgccgcnccgggtttattctcggtaatatcggcgggctggccgaggcattactggctatcgccggtatttatacacacaatatgctgctgttttccgccggaacgttctttaccggtattgccatcggtaccgcccagcaataccgctttgccgcactggaggaagcccctgccgcgctgcgggcaaaagctatcggcgtggtgatgagcggcgggattatcgccgtgctgatcgggccgtctctggcgatgtccacccggacactggtggcggcttatccgttcctcggtacgttcggcgcgctgacggctatctatctgatggcttttgttctgctgacatttttaccgctgaaagctcagcttcccgctcagatcagcgataccgtaaaaaaccgcccataccggcagttatattcccagccgctgctgattctgatcgccgtagtcagtgctaccggatatgcgctggtagtctatatggtcggctcgttcccgctggcgatgaaagcgcagggatttgaattcccggcaattgcctttgtgtttcagtgtcatattctgggaatgtttgcgccctctttctttaccgggcagttaatcagccgggccggggtaaaatgctttgtctggctgggggtgatttgcctgttaatcagcaatgcggtcagtctgaccggcagcagttacacgtactttctcattgccatgacttcgctgggactggcgtggaactttattctgatcagcaccacacatctgttgccgcgcacttataccggcaatgaacgggctaaaatccagggtgcgaccgattttcttatcttcagtttcggggcactcggcagtctgctggccggattcgccttctattatgcgggctggtattccgtaaatatcgccgggctggcaaccggcattgtgattctgatagtgatgtttttactgcgccgcagtatggatgaatccccggcagaaaaggccgccgcctga

SEQ ID NO: 6760 - protein, 396 aa, Morganella morganii
  misc_feature (69)..(69): Xaa can be any naturally occurring amino acid
MPRSVYWLSAALALFTTGNALVLSVAVLIGSQLADDPAHATIPLLAQYIGLISASVPMAHFMMRFGRRXGFILGNIGGLAEALLAIAGIYTHNMLLFSAGTFFTGIAIGTAQQYRFAALEEAPAALRAKAIGVVMSGGIIAVLIGPSLAMSTRTLVAAYPFLGTFGALTAIYLMAFVLLTFLPLKAQLPAQISDTVKNRPYRQLYSQPLLILIAVVSATGYALVVYMVGSFPLAMKAQGFEFPAIAFVFQCHILGMFAPSFFTGQLISRAGVKCFVWLGVICLLISNAVSLTGSSYTYFLIAMTSLGLAWNFILISTTHLLPRTYTGNERAKIQGATDFLIFSFGALGSLLAGFAFYYAGWYSVNIAGLATGIVILIVMFLLRRSMDESPAEKAAA

SEQ ID NO: 6761 - DNA, 708 bp, Morganella morganii
  misc_feature (617)..(617): n is a, c, g or t
atgagtcagataaatgcattcggacaaactgtcggtgatatcgttccggactggaccgcccgcccttaccctgcccgcatcagtgcggaaggccgtcactgccggatagatccgctgagtccggctcatacggatgacctgtaccgggcgttttcactcgcccctgacgggcgttactggacctggctgccggatgaaccaccggccgatctgaatgaataccgcgaccgtaccgaaaaaaatgcgcaatcgtcggatccgctgtttttcacgattacggataagcacaccggcaaagccgttggtctgttttccctgatgcggactgatgagaaaaacggtgttaccgaagtcggacatgtgcatttttccccgctgctcagcggcaccgtaatgtcaacggaagcccactggctgctgatgaaatatgtatttgatactctcggttaccgccgttatgaatggaaatgcgacagcctcaatgcaccgtcccgcaatgcggcactgcgcctgggttttcagtatgaaggctgtttccgtcaggcgcgggtggtcaaaggccgcacccgtgacaccgaatggttttccattactgaccgtgaatggccgctggttanccgcgccctggaacagtggctgtcagcggataatttcaccccggacggcaaacagatccgctctctggcatccctgcgtgatgcagtatga

SEQ ID NO: 6762 - protein, 235 aa, Morganella morganii
  misc_feature (206)..(206): Xaa can be any naturally occurring amino acid
MSQINAFGQTVGDIVPDWTARPYPARISAEGRHCRIDPLSPAHTDDLYRAFSLAPDGRYWTWLPDEPPADLNEYRDRTEKNAQSSDPLFFTITDKHTGKAVGLFSLMRTDEKNGVTEVGHVHFSPLLSGTVMSTEAHWLLMKYVFDTLGYRRYEWKCDSLNAPSRNAALRLGFQYEGCFRQARVVKGRTRDTEWFSITDREWPLVXRALEQWLSADNFTPDGKQIRSLASLRDAV

SEQ ID NO: 6763 - DNA, 903 bp, Citrobacter koseri
  misc_feature (583)..(583): n is a, c, g or t
atgaaaatcactctggaagaaatgcgggcatttattgccgtcgttgacagcggctccgtcacagcggcggccgcacaaaacgggctgaccgtttccgccatcagccgtgccctgctgcgtcttgaagaaaagatgaacactactcttctgtaccgcaccacgcgacggcttaaattgagtgaagaaggcgcattgtttttacaaaaagcccgtgatgtggtgcaactggcacaggaagcggaagatgtgctgatgaaccacaaagagatcccttccggcacactgcgtattgatgcctcaacgcctgttcagctccatgtgatagcaccgctggtgacacaattccatgaacgttatccgcaaatccgccttgaactgaccaactatgaaggtattaccaatttactggaaaaacagactgatattgcattccgcttcggtccgctggcagattcttccctgcatgccacgctgatgggctacacccggcagcggattctggccagcccgcgttatcttcagcagcatggcgagccgaaaacaccggaagagttggcgcagcatactctgctgggatttatcncgccggaaagcctgaatacctggccgctgtataacggcaacaaaaagggactgaaaattaccccgtcactggctgcgggcagcggagaaattatctgcaatctggcacgttccggcgcgggaattgcctgtatttccgattttgtgacacacgaaatgcgcgaaaacggggaatttcgtcaggttctgacgtcatacacttatgaaaacaaactgccgattaatgcggtgtattaccgcagtcaggcactttctccccggctgcgctgttttatcgattttgtcctgcaacacagccagtgttttaaacgccccggttaa

SEQ ID NO: 6764 - protein, 300 aa, Citrobacter koseri
  misc_feature (195)..(195): Xaa can be any naturally occurring amino acid
MKITLEEMRAFIAVVDSGSVTAAAAQNGLTVSAISRALLRLEEKMNTTLLYRTTRRLKLSEEGALFLQKARDVVQLAQEAEDVLMNHKEIPSGTLRIDASTPVQLHVIAPLVTQFHERYPQIRLELTNYEGITNLLEKQTDIAFRFGPLADSSLHATLMGYTRQRILASPRYLQQHGEPKTPEELAQHTLLGFIXPESLNTWPLYNGNKKGLKITPSLAAGSGEIICNLARSGAGIACISDFVTHEMRENGEFRQVLTSYTYENKLPINAVYYRSQALSPRLRCFIDFVLQHSQCFKRPG

SEQ ID NO: 6765 - DNA, 1392 bp, Morganella morganii
  misc_feature (839)..(839): n is a, c, g or t
ttggataagaaactcagtttaaccgcgctcaccgcattagtgctcagttctatggttggtgccggtgtatttagtcttccgcagaatatggccgaggttgccagtccggctgcacttattatcggctggtcaattaccggtgtcggtatcctctttctggctttcgccctgctgctgctttcccggctgcgtccggatctcgacggcggcatctttacctatgccaaagacggtttcggcgaactgattggtttctgctccgcctggggatactggttatgtgcggtgatcgccaacgtctcctatctggtgattgtgtttgcagcattcagtttttttacggataccccggacaatattgttttcggcgacggaaatacctggcaggccctgattggtgaatccgttctgctgtggtttgtgcattgtctggtactgcgcggagtacaaaccgctgccggtatcaataagctggcaacgttcgccaaactggtgccgctcggcctgtttatcgtactggccgtgatcgctttccgctgggataccttccatcttgatttcaccggtgtggatctcggagtacctgtgtggcagcaggtgaaagataccatgctgatcaccctgtgggtgtttatcgggattgaaggtgctgttgtggtttccgcccgtgcccgccgccgcaaagatgtcggcctggccacaatgatggcagtgatttccgcactgacgatttatatcctggttaccctgctgtcaatgggggttgttgcccgtccggaactggcagaaatgcgcaacccgtcaatggcgacactgatggtgaacctgattggcggcancggtgagattattatcgcagcgggtctgattatttctgtctgtggtgcatacctgagctggacaattatggctgccgaagtgccgtttatcgccgcactgcatggctctttcccgtcaccgtttaaaaaacagaatgcgaataatgccccatcctcctctttatggatgactaacggtgcggtacagctggcactggtactgatctggctcagcggcagtaattacaatacgctgctgaccattgcttctgaaatgattctggtgccctatttcctggtcggtgcattcctggtaaaaaccgccctgagaatgaaaaaaccggcactgctcggcgtgggtatgattgcggcaatgtatggcttatggctgatttatgcatccggcattatcaatctgatgctgtcagttgtgctctatgcaccgggtattctggtatttctctatgccctgaaaaaccgcgagataaaaaccacactgcattttatcgagtggagcattattgcagccctgctgatagcggcagttcccgcactctggtatctggtgcgctga

SEQ ID NO: 6766 - protein, 463 aa, Morganella morganii
  misc_feature (280)..(280): Xaa can be any naturally occurring amino acid
MDKKLSLTALTALVLSSMVGAGVFSLPQNMAEVASPAALIIGWSITGVGILFLAFALLLLSRLRPDLDGGIFTYAKDGFGELIGFCSAWGYWLCAVIANVSYLVIVFAAFSFFTDTPDNIVFGDGNTWQALIGESVLLWFVHCLVLRGVQTAAGINKLATFAKLVPLGLFIVLAVIAFRWDTFHLDFTGVDLGVPVWQQVKDTMLITLWVFIGIEGAVVVSARARRRKDVGLATMMAVISALTIYILVTLLSMGVVARPELAEMRNPSMATLMVNLIGGXGEIIIAAGLIISVCGAYLSWTIMAAEVPFIAALHGSFPSPFKKQNANNAPSSSLWMTNGAVQLALVLIWLSGSNYNTLLTIASEMILVPYFLVGAFLVKTALRMKKPALLGVGMIAAMYGLWLIYASGIINLMLSVVLYAPGILVFLYALKNREIKTTLHFIEWSIIAALLIAAVPALWYLVR

SEQ ID NO: 6767 - DNA, 717 bp, Morganella morganii
  misc_feature (556)..(556): n is a, c, g or t
atgacatttgtcaaaaagacccttgtccccgcacagcaaatggcgatcctccggtcgtgcccgttgtttcaggcggcagaggatgatgatctggcgctggtactggcagacagcacacatcgtcagtttgcggcgggggaattgatcagtcgtgaaggggagacagtaaaagcctgtccgctgatgatcagcgggcagattgatgttttccgtcatacctggtcgggtgaagagaaagtattcggtatgtttaccgccggtgagctggtggcgatcgccgctgtctttatgccgcacaaccgtttcccgatgagcctgcgggcgagaacagacagcagtgcgctgatgctggataaacaggcgattttacggctgtgtcatgcctgtccggcaattatggcgcagttactggcgcggttcagtctgaagctgtatgagaatatcaaccatatcgactggctgacctccagctctgcagagcagcggctggcagcttatctgctggatctgaaacggtgtcagcaatcggattgtgtggtgctgccgttatcgcgcnggcagttagccgcaaaactgggtgtccgctatgaaaccctcagccgcctgttttccggctggcggcagaaagcgtttatcggaattgataaagacgcggtgcggatcaccaatgaatcctatctggcggaactggctatcccggcgcagcgtcccttctga

SEQ ID NO: 6768 - protein, 238 aa, Morganella morganii
  misc_feature (186)..(186): Xaa can be any naturally occurring amino acid
MTFVKKTLVPAQQMAILRSCPLFQAAEDDDLALVLADSTHRQFAAGELISREGETVKACPLMISGQIDVFRHTWSGEEKVFGMFTAGELVAIAAVFMPHNRFPMSLRARTDSSALMLDKQAILRLCHACPAIMAQLLARFSLKLYENINHIDWLTSSSAEQRLAAYLLDLKRCQQSDCVVLPLSRXQLAAKLGVRYETLSRLFSGWRQKAFIGIDKDAVRITNESYLAELAIPAQRPF

SEQ ID NO: 6769 - DNA, 717 bp, Morganella morganii
  misc_feature (638)..(638): n is a, c, g or t
atgacatttgtcaaaaagacccttgtccccgcacagcaaatggcgatcctccggtcgtgcccgttgtttcaggcggcagaggatgatgatctggcgctggtactggcagacagcacacatcgtcagtttgcggcgggggaattgatcagtcgtgaaggggagacagtaaaagcctgtccgctgatgatcagcgggcagattgatgttttccgtcatacctggtcgggtgaagagaaagtattcggtatgtttaccgccggtgagctggtggcgatcgccgctgtctttatgccgcacaaccgtttcccgatgagcctgcgggcgagaacagacagcagtgcgctgatgctggataaacaggcgattttacggctgtgtcatgcctgtccggcaattatggcgcagttactggcgcggttcagtctgaagctgtatgagaatatcaaccatatcgactggctgacctccagctctgcagagcagcggctggcagcttatctgctggatctgaaacggtgtcagcaatcggattgtgtggtgctgccgttatcgcgcgggcagttagccgcaaaactgggtgtccgctatgaaaccctcagccgcctgttttccggctggcggcagaaagcgtttatcgnaattgataaagacgcggtgcggatcaccaatgaatcctatctggcggaactggctatcccggcgcagcgtcccttctga

SEQ ID NO: 6770 - protein, 238 aa, Morganella morganii
  misc_feature (213)..(213): Xaa can be any naturally occurring amino acid
MTFVKKTLVPAQQMAILRSCPLFQAAEDDDLALVLADSTHRQFAAGELISREGETVKACPLMISGQIDVFRHTWSGEEKVFGMFTAGELVAIAAVFMPHNRFPMSLRARTDSSALMLDKQAILRLCHACPAIMAQLLARFSLKLYENINHIDWLTSSSAEQRLAAYLLDLKRCQQSDCVVLPLSRGQLAAKLGVRYETLSRLFSGWRQKAFIXIDKDAVRITNESYLAELAIPAQRPF

SEQ ID NO: 6771 - DNA, 255 bp, Morganella morganii
  misc_feature (131)..(131): n is a, c, g or t
atgccgcataactatctgtttctgttccatgtgcagcacggattaaaaaaactgaaagtccgtttgcaggaagattccgtggcatcatccgttattgatgcgccgcgcaggatcaccacggaatgtgaaanagcgctggctgcgcaattttccgctgaaaatgattatctgaagtatgccggtgaaaatgtccgtgaaatctggcggacggacggtccggattatcagcgggtgtgggctgacgaaacgatgtaa

SEQ ID NO: 6772 - protein, 84 aa, Morganella morganii
  misc_feature (44)..(44): Xaa can be any naturally occurring amino acid
MPHNYLFLFHVQHGLKKLKVRLQEDSVASSVIDAPRRITTECEXALAAQFSAENDYLKYAGENVREIWRTDGPDYQRVWADETM

SEQ ID NO: 6773 - DNA, 1008 bp, Morganella morganii
  misc_feature (484)..(484): n is a, c, g or t
atgggcattgatttacccctgatttggttcgtcattattatattcagtacgttgatgtatatcgtaatggacggatttgacctcggcatcggcatcctctatcccttcgtgaaaagcaatgctgaccgcgatttgatgatgaacagtgttgccccggtctgggacggtaacgaaacctggctggtgctgggcggagccgcgttgttcggcgctttcccgctcgcctatgccgtgattctggatgcgctcgccattccgctgacactgatgctggtcgcgttaatcttccgtggcgtggcttttgagttccgctttaaagcggatgaacatcaccgttatttctgggatcgcgcgtttctgatcagctcagttatcgccacttttgtgcagggcgtggtcgttggcagcgtaattgaaggttttccggttgcaaaccgcgcctttaccggcggtgcctttgactggctggcgccgttcccgctgntctgcggtttcggtctggtgatcgcctatgccctgctaggctgcggctggctggtgatgaaaacggaaggtcatttacaacagcaaatgtataaggtactgaaacctctgaccctggtgatgctggcggtgctggccgtgatcagcctgtggaccccgctggcgcatgacgccattgcggcacgctggttcagcttcccgaatattctgttcttcctgccggtaccgctgctggtgcttgtctgtgccgttgcgctgttccgcagtgtcagccgtcatctgcactatacgccgttttttgcagcgctcggtctggtttttctgggcttcaccggactcggtatcagtatctggccgatgattattccgccggtgattaactacaaaatggccgccgcccccggcgaaagtctgagctttatgctggttggcgctttattcatcataccggtcatcctggtatatacctggtggagttattatgtcttcagaggaaaaatcacccatgaccagggctaccactga

SEQ ID NO: 6774 - protein, 335 aa, Morganella morganii
  misc_feature (162)..(162): Xaa can be any naturally occurring amino acid
MGIDLPLIWFVIIIFSTLMYIVMDGFDLGIGILYPFVKSNADRDLMMNSVAPVWDGNETWLVLGGAALFGAFPLAYAVILDALAIPLTLMLVALIFRGVAFEFRFKADEHHRYFWDRAFLISSVIATFVQGVVVGSVIEGFPVANRAFTGGAFDWLAPFPLXCGFGLVIAYALLGCGWLVMKTEGHLQQQMYKVLKPLTLVMLAVLAVISLWTPLAHDAIAARWFSFPNILFFLPVPLLVLVCAVALFRSVSRHLHYTPFFAALGLVFLGFTGLGISIWPMIIPPVINYKMAAAPGESLSFMLVGALFIIPVILVYTWWSYYVFRGKITHDQGYH

SEQ ID NO: 6775 - DNA, 1284 bp, Morganella morganii
  misc_feature (992)..(992): n is a, c, g or t
atggagcaacaactgcggttatggctgcaacaacaatttgaactcagtaatgactacgcctcatgggcggccattaccggggttattgtccttattctggctatcgctgttattctgcatcttaccctgcacaaaggccttctgccgtatattgaacgccgcaccggtggtactcagcgtccgtggggcgcgttaattacccgcacccggctgtttaaccggtttgcctttctgattcaggggatagtgtttaatattcaggcgctgatctggctgggacgcggctctgccgcacaggagatcctcacgaccggcgcacaggcatggtgtctgttgttcggcatgctgctgctgttttccgtgatggacattcttcagaacctctcccgccataccccgtctctgagccgccttccgctgcgcggcgtgatgcagagcctgaaactgattatcgcggtgctcttcagtatcctgattatttcgctgctgataggaaaatccccgctgattttactgagcggactcggtgccatgaccgccgtgctgatgctggtctttaaagacccgatcatgggactggtagccggtattcagttatcggtcaatgacatgcttaatgtcggggactggctggagatgccgaaatacggcgcggacggtgctgtgacggatatcgggctgacgacggtcaaagtgcagaactgggataataccattaccactatcccgacttacgccctgatttccgactccttcaaaaactggcagggaatgacggcatccggcggacggcgcatcaaacgcagtatgaacctggataccaccagcatccgttttctgaccgatgaagagatcagccggctgcggcaatcaaacctgatagccgggtatatcgatgccaaattacaggaaatcgcagaatacaatgcgcaggaacccggagataccctgctcaaccagcggcggctgaccaatatcgggacattccgtgngtatgcggaggcgtacatcaaagccagtccgcatattcacaagaagatgaccaccatggtgcgccagctggcacccacaccggacgggctgccggtggaaatctacgccttcaccaatgtgacggcgtggataagctatgagcaaatccagtccgatatttttgatcacctgttcgcgatcctgccgcaattctggctgcgggtacatcagacaccaacgggctttgatatgcgcggtattgcagcccatttcgcccgtgaatgtgaatcagaacgccgagccgggctgtaa

SEQ ID NO: 6776 - protein, 427 aa, Morganella morganii
  misc_feature (331)..(331): Xaa can be any naturally occurring amino acid
MEQQLRLWLQQQFELSNDYASWAAITGVIVLILAIAVILHLTLHKGLLPYIERRTGGTQRPWGALITRTRLFNRFAFLIQGIVFNIQALIWLGRGSAAQEILTTGAQAWCLLFGMLLLFSVMDILQNLSRHTPSLSRLPLRGVMQSLKLIIAVLFSILIISLLIGKSPLILLSGLGAMTAVLMLVFKDPIMGLVAGIQLSVNDMLNVGDWLEMPKYGADGAVTDIGLTTVKVQNWDNTITTIPTYALISDSFKNWQGMTASGGRRIKRSMNLDTTSIRFLTDEEISRLRQSNLIAGYIDAKLQEIAEYNAQEPGDTLLNQRRLTNIGTFRXYAEAYIKASPHIHKKMTTMVRQLAPTPDGLPVEIYAFTNVTAWISYEQIQSDIFDHLFAILPQFWLRVHQTPTGFDMRGIAAHFARECESERRAGL

SEQ ID NO: 6777 - DNA, 1071 bp, Morganella morganii
  misc_feature (620)..(620): n is a, c, g or t
atgacacatatgcagcagcgcccttatgaacgggcgctggcaacagagcctgccgcagacggcagaccggcggaggtagtggttctgatcaaccgcaacggcatgcgcatcagtattgccgataccggcgcgacctggctcagctgtgagctgccgctggcagacgggatgcgggatgtggtgtgcggtgtggcggacagcgacggatttgcccgtcagaccgcttatttcggcgcgacggtcgggcgttttgctaaccgcattgcgggcggcggtttcaccctgaaagggcagttttatccgctcgcctgtaatgaaggctctacttgcttgcacggcggaacggataacttcagccaccggcgctggcaaatccgccgccgctcagcggattccgtaacattctccctgcaatccccggatggcgaccagggctttccgggcaatctcagcgcagaagtgacttatcagctgaccccggaaaacgaagtccgcctgacttaccggacacaaacagacaaagcctgtccggtcagcctgaccaatcacgcttactttaaccttgccggtgaaagcagcggcgtgaaggtgacagaaggggaaatgcagatccgggcggncaaacgtctggggctgaatgcagataacttaccggacggcacactctgccctgtggccggcactgtgtttgatttgcgtacccgcagggcgctgtctcaggattttatgtctgaggcggcacaacagcagacaaaaggctttgatcacgcctttgtgccggatccggcattgtgtgatggtaaacagactgtcgcggcatactggtcaccggcgggggatgtgtgtctggaagtggcgaccaccatgccctgcatacagctttataccggcaattatctcggcggtcagccgggaaaacacggcgattatcaggattatgccgggctggcgctggaaacccagtatttcccggacgggccgaatcacccgcactggccggatgcggtcagaggcatttcagcagcgggggaacagcgggagagtgtgacagtataccggtttgtgttttaa

SEQ ID NO: 6778 - protein, 356 aa, Morganella morganii
  misc_feature (207)..(207): Xaa can be any naturally occurring amino acid
MTHMQQRPYERALATEPAADGRPAEVVVLINRNGMRISIADTGATWLSCELPLADGMRDVVCGVADSDGFARQTAYFGATVGRFANRIAGGGFTLKGQFYPLACNEGSTCLHGGTDNFSHRRWQIRRRSADSVTFSLQSPDGDQGFPGNLSAEVTYQLTPENEVRLTYRTQTDKACPVSLTNHAYFNLAGESSGVKVTEGEMQIRAXKRLGLNADNLPDGTLCPVAGTVFDLRTRRALSQDFMSEAAQQQTKGFDHAFVPDPALCDGKQTVAAYWSPAGDVCLEVATTMPCIQLYTGNYLGGQPGKHGDYQDYAGLALETQYFPDGPNHPHWPDAVRGISAAGEQRESVTVYRFVF

SEQ ID NO: 6779 - DNA, 1422 bp, Citrobacter koseri
  misc_feature (911)..(911): n is a, c, g or t
atgaaacgtgtccggcacattcactttgtcggtatcggcggtgccggtatgggcgggatagcggaagtgctggcgaacgaaggttatgagatcagcgggtctgatctggcgccgaatgcagtaacaaaacagctgactaacctgggcgcgacgatttatttcaatcaccgtccggaaaatgtggcagacgccagcgtggtggtggtatccaccgccatttcagcggataacccggaaatcgttgcggcgcgtgaagcccgtattccggtgatccgccgcgcggaaatgctcgcggaactgatgcgcttccgccacggtgtggcgattgccggtactcacggcaaaaccaccaccacggcgatgatttccggtatctacggccgcggcggtctggatccgaccttcgtcaacggcgggctggtcaaagctgccggtgtgcatgcgcgtctcggctcaagccgttacctgattgcggaagcggatgaaagtgacgcctctttcctgcacttacagccgatggtggccgtggtcaccaatatcgagccggaccacatggatacttatcacggtgattttgaaaccctgaaagatacctttgtgaacttcctgcacaacctgccgttctatggcctggctgtggtatgtatggatgatgcggtgatccgcgaaatcgtgccgcgtatcggccgttatgtaattacttatggttttcatgaagatgcagatgtccgcatcaccgattttgaacagcgcggctcacagtgcttcttcaccgttcaccgggagaatctgccggatctgactgtggaactgaatgcaccgggccgtcacaacgtcctgaatgccaccgcggcgattgcggtcgcgacagaagaaggtattccggatgaggatatcctggcctctctgcntgaattccagggcaccgggcgccgttttgatttcctcggcaacttcccgctggagcacgtcaaccagaaagagggcagtgtgatgctggtggacgattacggccatcacccgaccgaagtggatgcgactatcaaagcggcaagagcaggctggccggataagcggattgtgatggtgtttcagccgcaccgttacacccgtacccgtgacctgtatgatgattttgccaacacgctggatcaggtcgatatcctgctgatgctggatgtgtatgctgccggtgaaccggtcattccgggggcggacagccgttcgctgtgccgtacaatccgccagcgcggcaaactggatccgattctggtcactgaacccggcaaaattgcagcggttctggcacaggttcttgaagataatgatttaatactggttcaaggcgccggaaatatcggtaaaatagcgcgtacattggctgacacaaaattacggccggttttgagtgaggataattaa

SEQ ID NO: 6780 - protein, 473 aa, Citrobacter koseri
  misc_feature (304)..(304): Xaa can be any naturally occurring amino acid
MKRVRHIHFVGIGGAGMGGIAEVLANEGYEISGSDLAPNAVTKQLTNLGATIYFNHRPENVADASVVVVSTAISADNPEIVAAREARIPVIRRAEMLAELMRFRHGVAIAGTHGKTTTTAMISGIYGRGGLDPTFVNGGLVKAAGVHARLGSSRYLIAEADESDASFLHLQPMVAVVTNIEPDHMDTYHGDFETLKDTFVNFLHNLPFYGLAVVCMDDAVIREIVPRIGRYVITYGFHEDADVRITDFEQRGSQCFFTVHRENLPDLTVELNAPGRHNVLNATAAIAVATEEGIPDEDILASLXEFQGTGRRFDFLGNFPLEHVNQKEGSVMLVDDYGHHPTEVDATIKAARAGWPDKRIVMVFQPHRYTRTRDLYDDFANTLDQVDILLMLDVYAAGEPVIPGADSRSLCRTIRQRGKLDPILVTEPGKIAAVLAQVLEDNDLILVQGAGNIGKIARTLADTKLRPVLSEDN

SEQ ID NO: 6781 - DNA, 1809 bp, Citrobacter koseri
  misc_feature (205)..(205): n is a, c, g or t
gtgacaacaacaaatttgcatcactatcatttagtgacgcggctgcaacagcaaaaacagcgccggggtgacaaaatcgcactgcgacagtggtgtgaacaaggccagcatatcgattttacctggcagcaggccggggcgttcagtgaaaatctggcggaagccctgctggcagaaggggttgaagtgcaggaaaatgtcgccnttttctcgcataacagcgctctgtggacattaaccgacctggcgattcttcagtgccgcgccattgtggtaccgctctatgccaccagcagtgatgaccaggcggcctatattcttaatgatgcgcaggtgcgcattctgtttgtggacggtcagaagcaggcggaaattgccctgtcactgctctctctctgcccgtcgctgcaaaaaatcatcataatgaacccggaaaacacggcaatcccgtcgcatcctgcggtctgcacactgcgtcagtttatgaacggccacgatggcagttacgccgcagagctgcgtcagcgcatcgctgattgttcccttgatgatcttttcaccctgatttacacctccgggaccaccggcgagccgaaaggcgtgatgctggattaccgcaacatggccgcccagctttatctgcatgatgagcggctgacactgactgaagatgatgtctcactctgcttcctgccgctgacgcacgtttttgagcgcgcctggagtttctatgtgatgcacaccggcgcactgaatgtctatctcagtgataccaacctggtgcgcaaagcgatggtatcggtgaaaccgaccgtgatgtgtgcggtgccgcgtttctatgaaaaagtattcagcggtatttacgaaaaagtggcacaggcgccgtggtataaacgggcgttattccactgggcggtacggaccggtaaaaagactctcgatgcacaacagcgcggtgaaaaacagtcatggctggccgcgcggtgtgatcagttcgcacagaaaaaagtgctcggtaaactgcgtgatgtgctcggcggcaatgtccgtttcttaccggcggcgggggcgcggctggatgatgaaattatccgctttttcctcgccatcggcattaacatcaaatacggctacggcatgacagaaacctgtgccacggtatcctgctgggaaaacagcggttatcagctcggctctatcggtgtgccgctgccggatgtggaagtgcgtatcggtgaggaaaatgagattcaggtacgcgggccggtggtgatgcgcggctattacaataagccggaagagacccgtcaggcctttacggctgatggctggctgcggaccggcgacgccggtgcgctggatgagcagggcaatctgtttatcaccgaacgcctgaaagatctgatgaaaacctcgaacggcaaatatattgcgccgcagatgctggaaggcacactgggtcaggatcgctttatcgaacatatcgccgtggtggcggatgcgcgtaagtttgtctccgcactgattgtgccgtgttttgacactctggaagagcacgcgcgggcactgaatctgaaataccatgaccggatggaactgctgaaaaacagccagattgtggcgttgtttgaaagccgtctgaaagagttgcagaaaaatatcgcggcctttcatcaggttaagcgtttcacactgctgccgcagaatttctccatggagctcggcgaactgacaccgaccctgaaactgcgccgtaaagtgatcgcccagcgctatcagcgcgaaattgagtcgatgtatacggactga

SEQ ID NO: 6782 - protein, 602 aa, Citrobacter koseri
  misc_feature (69)..(69): Xaa can be any naturally occurring amino acid
MTTTNLHHYHLVTRLQQQKQRRGDKIALRQWCEQGQHIDFTWQQAGAFSENLAEALLAEGVEVQENVAXFSHNSALWTLTDLAILQCRAIVVPLYATSSDDQAAYILNDAQVRILFVDGQKQAEIALSLLSLCPSLQKIIIMNPENTAIPSHPAVCTLRQFMNGHDGSYAAELRQRIADCSLDDLFTLIYTSGTTGEPKGVMLDYRNMAAQLYLHDERLTLTEDDVSLCFLPLTHVFERAWSFYVMHTGALNVYLSDTNLVRKAMVSVKPTVMCAVPRFYEKVFSGIYEKVAQAPWYKRALFHWAVRTGKKTLDAQQRGEKQSWLAARCDQFAQKKVLGKLRDVLGGNVRFLPAAGARLDDEIIRFFLAIGINIKYGYGMTETCATVSCWENSGYQLGSIGVPLPDVEVRIGEENEIQVRGPVVMRGYYNKPEETRQAFTADGWLRTGDAGALDEQGNLFITERLKDLMKTSNGKYIAPQMLEGTLGQDRFIEHIAVVADARKFVSALIVPCFDTLEEHARALNLKYHDRMELLKNSQIVALFESRLKELQKNIAAFHQVKRFTLLPQNFSMELGELTPTLKLRRKVIAQRYQREIESMYTD

SEQ ID NO: 6783 - DNA, 978 bp, Morganella morganii
  misc_feature (775)..(775): n is a, c, g or t
atgcggcggatttttttatgtatactgatccgcaggataacgctgcgggtgacaggcatgaaatacgatctgaatgacctttattattttgtgaaagtggtagaatacggcggattttccccggcgggtgaggcgctgggtattccgaaatcccggctcagccgccgcattgctgacctggagcagaagctgaatatttcactgatctaccgctccacccggcagtttcatgtcactgagatcggccagaccttctaccagcagtgtaaaaatgtgattgatgaggcggagatcgccgaagagattatctgctcggtacaggggcatccgcgcggcagcgtgaagttttcctgtccggtcgcgctgttacaggcttatcttcaggatctgctgacagattttatggtgaaataccccgatattgatgtgcagatcctggcagttaaccgtccggtggatgtgatcagcgaagggtttgatctcgcactgcgggtgcgctccctcccgctggatgattccggcctgaccatgaaagtgctggggtattcgcggcgtatcctggttgcttcgccgctgttatttaccggaaaagcggcaccgcagcatccggatgaactgacagaattcccgatcctcgccaacagcgaacaaaaacagaactacacgctgacactgaccggcgaagacggcagcagtatcaccaaacacctcacggcacgcctcgccaccactgatgtcatgacactgcaccgcgcggcatgcaaagggctgggcnttgcccgtctgccggaaggtgtggttctcaatgatttgactgccggacggcttgtccgtgttctgccgggctggcagttcccgcaggatgtgatccacgcagttttcccgtcccgcaaagggctgttacccgccgtgcaggcactgctgaattatctggcggaacatgtgccgcagacggcggcgttttcggggcaggagtaa

SEQ ID NO: 6784 - protein, 325 aa, Morganella morganii
  misc_feature (259)..(259): Xaa can be any naturally occurring amino acid
MRRIFLCILIRRITLRVTGMKYDLNDLYYFVKVVEYGGFSPAGEALGIPKSRLSRRIADLEQKLNISLIYRSTRQFHVTEIGQTFYQQCKNVIDEAEIAEEIICSVQGHPRGSVKFSCPVALLQAYLQDLLTDFMVKYPDIDVQILAVNRPVDVISEGFDLALRVRSLPLDDSGLTMKVLGYSRRILVASPLLFTGKAAPQHPDELTEFPILANSEQKQNYTLTLTGEDGSSITKHLTARLATTDVMTLHRAACKGLGXARLPEGVVLNDLTAGRLVRVLPGWQFPQDVIHAVFPSRKGLLPAVQALLNYLAEHVPQTAAFSGQE

SEQ ID NO: 6785 - DNA, 915 bp, Morganella morganii
  misc_feature (472)..(472): n is a, c, g or t
atggatatacgcgcactccgctactttacagaggtggttcagtacaaaggattcagccgggcggcagaggcgttgtttgtcacgcaacccgccatcagccgcagtattcagaagctggagcatgaactgggatttccgttactggtccgtgataccggcggggtgacgctgaccgatgaaggggcgattctgtatgagcacgcgcgacggattctggtgcagtttcagtgtatgaacaaagcattacaggataaatccggcccgctgaccggcacactgaatgtgggattaccgccggttatcgcctcgacctggtttgccgggattatcatggcgtttacgtcccgccatccgcaggtggaactgaagatttttgaactgggcacgaaacagatggccgaagcgatgaccgacggtacggtggaaaccgctgcggtgatgctgccgtttgatgagcaactgtttgatctgnaccgctttgccaccgaccggctgatgctgctggtgaatcatcagcacccgctggcggcaaaaaaacaggtaagctttgcggatattatccgtgagccgtttgtgtttttctccgaagcattccggataaacgacctggtgcgcagtgcgtgcgggatttacagcacggaaccggtggtggcaggacggagcaatcacctcgatctgatcctggcgatggtcagggcaggggtggggatcacactgctgccggacagcatgtggcgtgaacgcacggctgatggtctggtgctgctcccggtaaccgatccggtgctctcctacgatctggcgctggccggtgtgcgcggcgggtatcagagccgcagctgccgtgcgtggaatgcactggcgatggaaatactcggtattccgtatgtaaccggagccggccatttactgtaa

SEQ ID NO: 6786 - protein, 304 aa, Morganella morganii
  misc_feature (158)..(158): Xaa can be any naturally occurring amino acid
MDIRALRYFTEVVQYKGFSRAAEALFVTQPAISRSIQKLEHELGFPLLVRDTGGVTLTDEGAILYEHARRILVQFQCMNKALQDKSGPLTGTLNVGLPPVIASTWFAGIIMAFTSRHPQVELKIFELGTKQMAEAMTDGTVETAAVMLPFDEQLFDLXRFATDRLMLLVNHQHPLAAKKQVSFADIIREPFVFFSEAFRINDLVRSACGIYSTEPVVAGRSNHLDLILAMVRAGVGITLLPDSMWRERTADGLVLLPVTDPVLSYDLALAGVRGGYQSRSCRAWNALAMEILGIPYVTGAGHLL

SEQ ID NO: 6787 - DNA, 2739 bp, Morganella morganii
  misc_feature (389)..(389): n is a, c, g or t
atggctaataccactattcttgcgttacaggggctgtcctgcggacattgcaccggcagtgtgaaaaaagctctcgacgcccgcccggatgttgaatctgcggtggtcacccttgatttcgccaaagtgaccggcgatgcggatgcgcaatccctcatcagtactatcgaagaagcgggttatgaagctcagattgcagacaaacccggtacaattttacagctttccgggctgaattgtatgaaatgtgcagcgaaaacgcaaagtgcattagaagcggttgacggtgttgcggctgcggtcgttgataccaaagaagcaaaagtgtacggcagcgccgatgcgcagaccttaatcagcgcagtggaagccgccggttttcaggcggnggtggcaggagaaaacgcctccccaaaatctgaaccgctgacgccgtctcagactgaggctgcggcagcggagcactgcgacattccggccacccctgacaatacccctgccatgccggtgattgaagaggatgacgacagtctctccttcctgctcgacggcatgacctgtgcaagctgtgtcagcaaagtacacaaagcgctgctcagtgtggacggcgtggaaaatgcccgcgttaacctcgcggaacgcagtgcactggtcaccgggcacgcctctgcagaggcgctgatcgccgctgtggagaaagccggttacggcgcggagctgattcaggatgacgccaaacgccgtgagcgccagcaggaagtggctgtcgccaatatgaagcggttccgctggcaggctgctctggcactggcggtcggtatcccggtgatgatctgggggatgatcggcgacaatatgatgctgaccccggcgaacaacgggatctggctgaccatcgggatcgtcaccctggcggtgatgattctggcgggcgggcatttctaccgcagcgcctggcaatccctgaaaaacggcagtgcaacgatggataccctggtggctctcggcaccggtgccgcatggctctattccatcactgtaaacctctggccggatgtattcccgccgcaggcgcgtcacctctattacgaggccagcgccatgattatcggtctgataaacctggggcatatgctggagcagcgtgcccgccagcgttcgtcaaaagcactggagcgcctgctggatctgactccgccgaccgcccgtgtggtgacaccggaaggtgagaaagatgtaccgctggcagatgtgcagcccgggatgatcctgcgcctgaccaccggtgaccgcgtgccggtcgatggtgagatcacggaaggcgaagtgtggatggatgaggcgatgctgaccggggagccaatcccgcagcagaaaaccaccggtgataccgtttctgccggaaccaccgtgcaggacggcaccgtactgtttcgtgccgccgctgtcggcagcaaaaccacactggcacgcatcattaaactggtgcgtcaggctcagagcagtaaaccggaaatcggtcaactggcagataaaatctcagccgtttttgtaccggttgtggtggttatcgccctgatcgccggtgctgtctggtacttcttcggtcctgcgccgcagataacctatgcactggtcattattaccacggtactgattatcgcctgtccgtgtgcgctggggctggcaacaccgatgtcaattatctccggggtcggccgcgccgctgagtttggtgtgctggtgcgggatgccgatgctttacagcaggcaagcaccctcgacaccattgttttcgacaaaaccgggaccctgaccgaaggcatgccgcaggtaacggagatccatacctttaatggtttcagtgacgatgatgtcctgtgtctcgcggcggcgctggaaagcggttctaatcacccgctggcccgcgctatcactgaacgtgcgaaagagctgacactgccgtctgttactcagttccgtaccctggcgggtatggggatcagcggggagtctgaaggccggacactgctgctgggtaaccatgcactgatgcaggcacagaatatcagcactgccggtgaggcggatgcactggtgcaatcccaggccggtaaaggtgtgaccccggtgatgctggcagttgacggcaacatcgcggcaatactttccgtccgtgacccgctgcgtgaggacagtgtcagtgcgctggcgcgtctgcacaaacagggataccgactggtgatgctgaccggggacaacgaagtgaccgcccgggctatcgccaaagaggcgggcattgatgaagtgatcgccggtgtgctgccggacggcaaagccgctgccattgaaaaattacagcaggccggacgccgtgtcgccatggtcggtgacggtattaatgacgcaccggcactggcacgggccgatgtggggatcgctatgggcggcggcagtgatatcgccatcgaaacggcagcaatcactctgatgcgccacagcctgcacggtgtggccgatgccgtggctatctcgaaagggacactgcgcaatatgaaacagaacctgctgggtgcctttatttataacaccctcgggatcccgatcgcagccggggtactgttcccgttcaccggcacactgctgaatccggtagtggcaggggcggccatggcgctgtcatccattaccgtggtcagtaacgccaaccggttgttacgttttaaaccaaaagattaa

SEQ ID NO: 6788 - protein, 912 aa, Morganella morganii
  misc_feature (130)..(130): Xaa can be any naturally occurring amino acid
MANTTILALQGLSCGHCTGSVKKALDARPDVESAVVTLDFAKVTGDADAQSLISTIEEAGYEAQIADKPGTILQLSGLNCMKCAAKTQSALEAVDGVAAAVVDTKEAKVYGSADAQTLISAVEAAGFQAXVAGENASPKSEPLTPSQTEAAAAEHCDIPATPDNTPAMPVIEEDDDSLSFLLDGMTCASCVSKVHKALLSVDGVENARVNLAERSALVTGHASAEALIAAVEKAGYGAELIQDDAKRRERQQEVAVANMKRFRWQAALALAVGIPVMIWGMIGDNMMLTPANNGIWLTIGIVTLAVMILAGGHFYRSAWQSLKNGSATMDTLVALGTGAAWLYSITVNLWPDVFPPQARHLYYEASAMIIGLINLGHMLEQRARQRSSKALERLLDLTPPTARVVTPEGEKDVPLADVQPGMILRLTTGDRVPVDGEITEGEVWMDEAMLTGEPIPQQKTTGDTVSAGTTVQDGTVLFRAAAVGSKTTLARIIKLVRQAQSSKPEIGQLADKISAVFVPVVVVIALIAGAVWYFFGPAPQITYALVIITTVLIIACPCALGLATPMSIISGVGRAAEFGVLVRDADALQQASTLDTIVFDKTGTLTEGMPQVTEIHTFNGFSDDDVLCLAAALESGSNHPLARAITERAKELTLPSVTQFRTLAGMGISGESEGRTLLLGNHALMQAQNISTAGEADALVQSQAGKGVTPVMLAVDGNIAAILSVRDPLREDSVSALARLHKQGYRLVMLTGDNEVTARAIAKEAGIDEVIAGVLPDGKAAAIEKLQQAGRRVAMVGDGINDAPALARADVGIAMGGGSDIAIETAAITLMRHSLHGVADAVAISKGTLRNMKQNLLGAFIYNTLGIPIAAGVLFPFTGTLLNPVVAGAAMALSSITVVSNANRLLRFKPKD

SEQ ID NO: 6789 - DNA, 885 bp, Citrobacter koseri
  misc_feature (463)..(463): n is a, c, g or t
atgatgaagcaatacctgcaagtgaccaaaccgggaattattttcggaaatttaatttctgtggtcgggggattcctgctcgcctccaaaggtgacattgattaccccctgttcattgcgacattgctcggtgtctcgctggtcgtggcctccggttgtgtttttaacaattacatcgaccgcgacatcgactccgtcatggaacgcacgaaaaaccgccctctggtaagagggcttattgacccgaaaatcagtctggtttatgcctctgtgctgggtattgccggcatggtgctgctgttagtggcagccaatgcggtggcaatgctgattgctgttgtcggctttgtggtttatgtcggggtttacagcctgtacatgaaacgcaaatcggtctacggcacactggtcggcagtctgtccggtgccgcaccgccggttatcggctactgcgcggtgacangccagtttgataccggcgcactgatcctgctgttaatcttcagtttatggcagatgccgcactcctatgcgattgccatcttccgtttcaaagattaccaggcggccaatatccctgtactgccggtgattaaaggtatttctgtggcgaaaaaccacattatcctgtacatcatcgcctttatgtttgccacactgatgctcgccatcagcgggtatgcgggatataagtacctgattgtcgccgcagcggtcagtgtctggtggctgggcatggcgttatcgggctataagacaaccaatgatcgtgtctgggcgcgtaaattgttcgtgttctccattgtcgctatcacgtcactcagtgtgatgatgtctgttgaccccagcgtctccggtgatgttctgctggcctacagtcgttaa

SEQ ID NO: 6790 - protein, 294 aa, Citrobacter koseri
  misc_feature (155)..(155): Xaa can be any naturally occurring amino acid
MMKQYLQVTKPGIIFGNLISVVGGFLLASKGDIDYPLFIATLLGVSLVVASGCVFNNYIDRDIDSVMERTKNRPLVRGLIDPKISLVYASVLGIAGMVLLLVAANAVAMLIAVVGFVVYVGVYSLYMKRKSVYGTLVGSLSGAAPPVIGYCAVTXQFDTGALILLLIFSLWQMPHSYAIAIFRFKDYQAANIPVLPVIKGISVAKNHIILYIIAFMFATLMLAISGYAGYKYLIVAAAVSVWWLGMALSGYKTTNDRVWARKLFVFSIVAITSLSVMMSVDPSVSGDVLLAYSR

SEQ ID NO: 6791 - DNA, 1134 bp, Citrobacter koseri
  misc_feature (905)..(905): n is a, c, g or t
atgatcgaagataatacctttattacttctgatatcacttctgagggtattgaccggcgaagctttctgaaactctgtgcggccttagcggccaccatgggtctcagtgcaaatgcatctgccgaaatcgcggcgtccgtcagccgtaaggattgtccccccgtcatctggatatctgcacaggagtgtaccggttgcactgagtccctgctccgggcgacgcacccgaccatcgaaaatctcatccttgatatgatttcgctggagtaccacgaggtactctcggcggcattcggtcatcaggcggaagccaataagcacaatgcgattgagaaatacaaaggcaaatatgtgctggtggtggacggctctgtaccgctgaaggataacggcatttactgcatgattgccggcgagccgattgccgatcacatccgccgggcagcggagggcgctgccgcaattattgccatcggctcctgtgccgcctggggcggcgtggctgccgccggtgataacccgaccggcgcggcatcactggaagcggttctgccgggcaaaaccgtgattaatattccgggctgcccgcctaacccgcataacttcctggcaacggttgcccacatcatcacttatggcaaagccccggggctggatgacaaaaaccggccgctgtttgcttacggtcgtctgatccacgaacactgcgagcgccgcgctcactttgacgcaggacgttttgccaaagcattcggcgaccacggtcaccgtgaaggctggtgcctctatcacctcggctgcaaaggaccggaaacgcacggcaactgctccacactgcagttctgtgatgtcggcggcgtgtggccggtggctatcggccatccctgctatggctgtaacgaggncggagtgggcttccacaaagggatccaccagctcgccggggtacagaaccagacaccgcgttctgaaaaaccggatgtggaactgaaagagggcggttcggtatcgggcggcgctatcgggctgctcggcggcgtggtggggctggtggccggtgtcagtgtgatggctgtccgtgagctgggccgccagcagaagaaaaaccggtccggcgatccgcggggagagtaa

SEQ ID NO: 6792 - protein, 377 aa, Citrobacter koseri
  misc_feature (302)..(302): Xaa can be any naturally occurring amino acid
MIEDNTFITSDITSEGIDRRSFLKLCAALAATMGLSANASAEIAASVSRKDCPPVIWISAQECTGCTESLLRATHPTIENLILDMISLEYHEVLSAAFGHQAEANKHNAIEKYKGKYVLVVDGSVPLKDNGIYCMIAGEPIADHIRRAAEGAAAIIAIGSCAAWGGVAAAGDNPTGAASLEAVLPGKTVINIPGCPPNPHNFLATVAHIITYGKAPGLDDKNRPLFAYGRLIHEHCERRAHFDAGRFAKAFGDHGHREGWCLYHLGCKGPETHGNCSTLQFCDVGGVWPVAIGHPCYGCNEXGVGFHKGIHQLAGVQNQTPRSEKPDVELKEGGSVSGGAIGLLGGVVGLVAGVSVMAVRELGRQQKKNRSGDPRGE

SEQ ID NO: 6793 - DNA, 468 bp, Morganella morganii
  misc_feature (170)..(170): n is a, c, g or t
atgatgcagaaatacggcacgctggtgattgttctgattgtggcggtctccgcctggctggcggggttaccggggcagtttatcgaaacccgtccgtcagagccggtaccgcagcatacagaacagccgcagagcattgatgccctgacagcacagtcacgggtggtcanctatgtgcagcagcaccagcgtctgccggattactatgtgacgaaaaaagccgcccgtaatgcgggctggcagccgtcaaaaggtaatctctgtgaggtgatgccgggtaaagctatcggcggcgaccgtttcggtaaccgggaaaaagggctgccggatgcgccatcacgccagtggtttgaagcggacataaactataactgcggccatcgcggcagtgatcgtctgctttattccagtgacgggctgatttatgtcaccactgatcattaccgttcgtttcagcaggccaattaa

SEQ ID NO: 6794 - protein, 155 aa, Morganella morganii
  misc_feature (57)..(57): Xaa can be any naturally occurring amino acid
MMQKYGTLVIVLIVAVSAWLAGLPGQFIETRPSEPVPQHTEQPQSIDALTAQSRVVXYVQQHQRLPDYYVTKKAARNAGWQPSKGNLCEVMPGKAIGGDRFGNREKGLPDAPSRQWFEADINYNCGHRGSDRLLYSSDGLIYVTTDHYRSFQQAN

SEQ ID NO: 6795 - DNA, 1803 bp, Proteus mirabilis
  misc_feature (1343)..(1343): n is a, c, g or t
gtgcaaacctttaatgccgatatcgcaattatcggagcaggcggtgcagggctgcgggcggcgattgccgctgcggaagctaacccgaacctgaaaattgctctgatctcaaaagtttacccgatgcgcagtcacaccgtggccgcagaaggtggctctgcggctgtgacacaatcccatgattcctatgattatcatttcagtgatacggtgtccgggggcgactggttatgtgagcaggatgtggtggagtattttgtcgaacactgtccgacagaaatgacccagctggaactgtggggctgcccgtggagccgcaaagaagacggttccgtcaacgtgcgccgtttcggcggtatgaaaatcgagcggacctggtttgccgccgataaaaccggctttcatatgctgcacaccctgttccagacctctctgaaatacccgcagatccagcgttttgatgagcattttgtcctcgatatcattgtggatgaaggccatgtgcgcggcctggtggctctcaacatgatggaaggaacaaaagttcagatccgcgccaattccgtgattatggccaccggcggtgccggtcgtgtttaccgctataacaccaacggcgggattgttaccggtgacgggatgggaatggctttccgtcacggcgtgccgctgcgggatatggaattcgttcagtatcacccgaccggtctgccgggttccggtattctgatgaccgaaggctgccggggcgaaggcggtattctggtcaacaaagacggctaccgctatctgcaggattacggcatggggccggaaaccccgctcggccatccggaaaacaaatacatggaactcggcccgcgcgacaaagtctcccaggcgttctggcacgagtggcgcaaaggccggactatcaaaaccagccgcggtgatgtggtttatctggatctgcgtcatctcggcgagaaaaaactgctggagcgtctgccgtttatctgcgagcttgcgaaagcctatgtcggcgtggacccggtcaaagagccgatccctgtccgtccgaccgcgcactacaccatgggcggtatcgaaaccgaccagcgctgtgaaacccgcatcaaagggctgtttgctgtcggtgagtgttcctccgtcggtctgcacggcgctaaccgcctcggttccaactccctggcggaactggtggtcttcggtcgtctggccggggaagaagcggctaagcacgcacaggaaacacacgctgccaacagtaatgctatcgatgcccgcaccgctgacattgaaaacaatctgaaagcgctgatgaaccagaaaggctctgaaanctgggcaaaactgcgtgatgagatgggtgaggcaatggaagaaggttgtggtatctaccgcacaccggagctgatgcagaaaaccatcgataaactggctgagctgaaagagcgcttcagacgcgttgaaatcactgaccgctcctctgtcttcaataccgacctgctctacactattgagctgggctttggtctggatgtcgcggaatgtatggcgcactccgcctttaaccgtaaagaatcacgcggcgcacaccagcgtctggatgaaggctgtactgagcgcgacgatgtcaatttcctgaaacacaccctcgccttccacaatccggacggttcgccgcatctggaatacagtgatgtgaagataaccaaatccgccccggcaaaacgtgtctacggtggtgaagcggcggcggctgaacaggcggcaaaagagaaggaaaacgtcaatggctga

SEQ ID NO: 6796 - protein, 600 aa, Proteus mirabilis
  misc_feature (448)..(448): Xaa can be any naturally occurring amino acid
MQTFNADIAIIGAGGAGLRAAIAAAEANPNLKIALISKVYPMRSHTVAAEGGSAAVTQSHDSYDYHFSDTVSGGDWLCEQDVVEYFVEHCPTEMTQLELWGCPWSRKEDGSVNVRRFGGMKIERTWFAADKTGFHMLHTLFQTSLKYPQIQRFDEHFVLDIIVDEGHVRGLVALNMMEGTKVQIRANSVIMATGGAGRVYRYNTNGGIVTGDGMGMAFRHGVPLRDMEFVQYHPTGLPGSGILMTEGCRGEGGILVNKDGYRYLQDYGMGPETPLGHPENKYMELGPRDKVSQAFWHEWRKGRTIKTSRGDVVYLDLRHLGEKKLLERLPFICELAKAYVGVDPVKEPIPVRPTAHYTMGGIETDQRCETRIKGLFAVGECSSVGLHGANRLGSNSLAELVVFGRLAGEEAAKHAQETHAANSNAIDARTADIENNLKALMNQKGSEXWAKLRDEMGEAMEEGCGIYRTPELMQKTIDKLAELKERFRRVEITDRSSVFNTDLLYTIELGFGLDVAECMAHSAFNRKESRGAHQRLDEGCTERDDVNFLKHTLAFHNPDGSPHLEYSDVKITKSAPAKRVYGGEAAAAEQAAKEKENVNG

SEQ ID NO: 6797 - DNA, 1257 bp, Morganella morganii
  misc_feature (839)..(839): n is a, c, g or t
atgtcacaacgccgaatccgccgctttgcggccagtatgataaccgccgccgcgctgatattcagtttgtcagccatggcgaaaccggatgaactggtgatcgccaccacgttttcaccggaagcaacagcccatattatcagcagctggcagcagcagcccggagctgtccgtatccgtaccattaaccgcaccagtgcggcactggagcgtctgctggatactcctgcactggaagatgtggatctggtggtgacatcctcgccgatgttattgcagcatctgcaggagcatgaccggctggcagagctcactgatctgccggatgtttcccggcgtctggtgccgctgcggctgcgcgataatgcggcagcggtggcattttccggttacggcattctggtgaataaacggcggatggcggaaaataatctgccggttccggcatcgtgggattccctgaccgacagccgctatcaggggttgctgctgatgagcagcccgtcacgctcggacacctatcatctgatggtcgaatcactgttacagcagcgcggctgggatgagggctgggcattgctgctcaatgtttccgggaatctggcgactatctcatcacgcagtttcggtgtggcggacaagatcaaagccggactgggcggtgccgcaccggtgattgataactacgcctggctgctgctgggcgatccggagctggcctttaattatctgccggattccgcgacatccccgacctttgttgcgataagccgccacagcctgaatcaggacaaagcccgcgcctttatccgctttcttctcagtgaacaggggcagantgtgctggcggacagcagcaccggtaaatatccggtcacaccgctgccgcagggaaatccgcgtgagccggtgcagcgccgcctgctgaattccccgcatcagatggatgagaatctggtgctcaaacgccagcgcatggtacagcagctgtttgataccgcgatcactttccgtctgacggaatccatcgacgcctggcgtgcgctgtataccgccgaagcccgcgtgaaacgcccgctgccgtatatccgtgccctgctgattgccatgccggtctctgcgcaggagagtgccgacccggcctattactcacgttttgacgataaccgcaaagccgaggaagagtatatccgctggcagcagttcttccgcgagcaacagcgcaaagcgattgcggaactggagaaagtccggtga

SEQ ID NO: 6798 - protein, 418 aa, Morganella morganii
  misc_feature (280)..(280): Xaa can be any naturally occurring amino acid
MSQRRIRRFAASMITAAALIFSLSAMAKPDELVIATTFSPEATAHIISSWQQQPGAVRIRTINRTSAALERLLDTPALEDVDLVVTSSPMLLQHLQEHDRLAELTDLPDVSRRLVPLRLRDNAAAVAFSGYGILVNKRRMAENNLPVPASWDSLTDSRYQGLLLMSSPSRSDTYHLMVESLLQQRGWDEGWALLLNVSGNLATISSRSFGVADKIKAGLGGAAPVIDNYAWLLLGDPELAFNYLPDSATSPTFVAISRHSLNQDKARAFIRFLLSEQGQXVLADSSTGKYPVTPLPQGNPREPVQRRLLNSPHQMDENLVLKRQRMVQQLFDTAITFRLTESIDAWRALYTAEARVKRPLPYIRALLIAMPVSAQESADPAYYSRFDDNRKAEEEYIRWQQFFREQQRKAIAELEKVR

SEQ ID NO: 6799 - DNA, 1929 bp, Morganella morganii
  misc_feature (889)..(889): n is a, c, g or t
atgaaacgaactctactctgctcagctattctgctggcaaccgcgcctgcggtacaggcagaaagcgcagatattctgaccgtctggggcagcccggtggcctccaatccggatgtcatcacacagccgcagatgcagtcgctgaacaaaaccaacgcggcgacagccatcagcaccatgccgggtgtggttctcgaaaaatccggcaaccgcaatgagctgacggtaaaagtccgtggttttgacagccgacaggtgccggtgttcttcgacgggatcccgacttatgtcccgtatgacggcaaccttgacctcggccgctttatgaccagcgaactggaaagtattgaggtgagcaaaggctatacctcgctgttacagggcccgaacctgatgggcggtgcaatcaacctcaccaccaccaccccgaaaaaaccgtttgaggccaatgtgtcattcagccagggcttcgcacgcggcgcggataatgcctataacaccagcgcccgtgtcggcgcacgcagcgacctcgggtttatccaggtcagcggcagccagtacaaacagcgtttcctcggcctgccgggctccgatgatgacaatgccctggctggcagcaacggccgccgtgcgcattccgcatccgatgataaacgcggcatggtgaaagtgggctggaccccgcgtgaaaccgaccagtatgtctttacctatctgaagcaggacggcagcaaagacagttcgccgtctgcggtgccgggcaaaggcaaatacagctggtgggaatggccggattacaacaaagagagctactatttcaacagcaccactcagctgacagacggcgtgaacctccagggccgcctgttccatgacaagtttgaaaatnccctgctgatgtataaaaaagacggcaaagggtacgattacagctattacgatgatttcagcaacggcgcctctctccagttagggatcgatatgcgcgaaagcgatctgctgtcattctccgcacactggaaagatgacgttcaccgcgcacagaaacagcgtaacggggatattctgcgttacaaagatcgcacttattctgtcgctaccgaataccagtgggcagccacgtctgatctcgatttcatcggtgccatcggctatgactggcgcgaaagccgtcaggcggataaaggtgcggatgataatgatcagcacgcgtttaactgggaagtgatgtcaaaatacaccttcgccaaccaggacaacgtgcgggtctccgtgtctgaccgcagccgcttcccgacacagaaagagcgctataccactgaaaaaccaaaagacggctcgctgggtatcattaacccgaacctgaaagccgaacgcgcactgaccttcgatttaacctatgaagggaatatcaccgataaatggggctaccaggccagcatctatcacaaccgcgtggaagatgcgatcctcgcgcacacagtgattaaaaacggtgaccgctacttccagaaccagaacagtggccgtgtggattacaccgggctggatctgggcgtgaaaggcgaagtcagtgactggctgaaaaccgggatcaactacagctacatccacagtgatccgaaagatgttgatcatgcggaagggctgccgaagcataaaatgtatgcctgggtgaaagtcacaccgatagagccgctgtcgatcaccctgtccgaagagttccgtgcctggagctatcagtataacgacagtaatgagaaagtggccggttatgctcttaccggcctgcgcgtggattatgacttcggttacggcatttccgccaatgcctccgtcaataacctgtttgataaatcctacgagtacaccaacggctatatggaagaaggccgtaacttctggctgggcgtggaataccgctattaa

SEQ ID NO: 6800 - protein, 642 aa, Morganella morganii
  misc_feature (297)..(297): Xaa can be any naturally occurring amino acid
MKRTLLCSAILLATAPAVQAESADILTVWGSPVASNPDVITQPQMQSLNKTNAATAISTMPGVVLEKSGNRNELTVKVRGFDSRQVPVFFDGIPTYVPYDGNLDLGRFMTSELESIEVSKGYTSLLQGPNLMGGAINLTTTTPKKPFEANVSFSQGFARGADNAYNTSARVGARSDLGFIQVSGSQYKQRFLGLPGSDDDNALAGSNGRRAHSASDDKRGMVKVGWTPRETDQYVFTYLKQDGSKDSSPSAVPGKGKYSWWEWPDYNKESYYFNSTTQLTDGVNLQGRLFHDKFENXLLMYKKDGKGYDYSYYDDFSNGASLQLGIDMRESDLLSFSAHWKDDVHRAQKQRNGDILRYKDRTYSVATEYQWAATSDLDFIGAIGYDWRESRQADKGADDNDQHAFNWEVMSKYTFANQDNVRVSVSDRSRFPTQKERYTTEKPKDGSLGIINPNLKAERALTFDLTYEGNITDKWGYQASIYHNRVEDAILAHTVIKNGDRYFQNQNSGRVDYTGLDLGVKGEVSDWLKTGINYSYIHSDPKDVDHAEGLPKHKMYAWVKVTPIEPLSITLSEEFRAWSYQYNDSNEKVAGYALTGLRVDYDFGYGISANASVNNLFDKSYEYTNGYMEEGRNFWLGVEYRY

SEQ ID NO: 6801 - DNA, 3762 bp, Citrobacter koseri
  misc_feature (1471)..(1471): n is a, c, g or t
atgagcaagtttttagacagattccgttattttaagcagcgcggggaaaccttctccggcaaccacggacaagagctgaacgtcaaccgcgactgggaagatggttaccgcagccgctggcagcatgacaaaattgtccgttccacccacggcgtgaactgtaccggttcatgcagctggaaaatttacgtgaaaaacgggctggtaacctgggagacgcagcagacggactacccgcgtacccgtcctgatctgcctgaccacgagccgcgcggctgtccgcgtggtgccagctattcctggtatctgtacagcgcaaaccgcgtgaagtatccgatggtgcgcaagcgcctgatcagactgtggcgtgaagccaaagctcagcacgcggacccggtcgatgcgtgggcatccattattaatgatgaggcaaaagccaaaagctacaaacaggcacgcggccgcggcgggtttgtccgctccgactggcaggaagtgaatgaaatgattgcggcagccaatattgtgactgccaaacagttcggccctgaccgtattatcggcttctcgccgatcccggcgatgtcgatggtctcctatgcttccggtgcccgttatctatccctgatcggcggtgcctgcctgagtttctatgactggtactgcgacttaccgccggcctccccgcaaacctggggtgagcagactgacgtgccggaatcagcagactggtataactcctcttatctgattgcctggggttccaacgtcccgcagacccgtaccccggatgcgcacttctttactgaagtccgctataaaggcaccaaaactgtcgcgatcacgcccgattatgctgaaatcgccaaactgtgtgaccagtggctgaacccgaaacagggcacagacagcgccgttgcactggcgatggggcatgtgatcctcaatgagttccacgcgaagcgtcaggcggaatacttcaccaattatgtccgcacttacagcgacatgccgatgctggtaatgctggatccgcgtgcggaaggcggctatgtgccgggccgtatgctgcgggcatctgatctggtggattctctcggcgagaaagaaaatgctgagtggaaaaccatcgctattgatgaaaacagtcagcaactggtggcaccacagggctctatcgggttccgctgggataaatcccgcaaatggaacctggagccgcgtgacggcaagagcggtgatgagatcactatgcagctgagcctgctggataagcacgatgaagttgctgatgtcgctttcccgtatttcggcggcattgaaaatgaattctttgaaggtgtggcactggatgaagtgctgatgcacaaactgccggtgaaagtggtacgtctggcagacggcagtgaagtccgtgtggcaagtgtcttcgatttgaccctcgccaactacggtatcgaccgcggtctgnacgatgtgaactgcgcggcggattacagcgaaatcaaggcctataccccggcctgggcagagaaagtgaccggcgtcagccagcatcatatctcccgcattgcccgtgagtttgccgataacgccgagaaaactcacggccgttcaatggtgattgtcggtgccggtatcaaccactggtatcacatggacatgacctaccgcggtatcatcaatatgctggtgttctgcggctgcgtcggccagagcggcggcggctggtcccactatgtaggccaggaaaaactgcgtccgcagaccggctggttaccgctggcgttcgggcttgactggtcacgtccgccgcgtcatatgaacagcacctcgttcttctataaccactcaagccaatggcgttatgaaactgttcagccgcaggagcttctctccccgctggcggataaatcccgcttcagcggcagcctgctggacttcaacatccgtgccgagcgcatgggctggctgccgtccgcaccgcagctgaacgtgaacccgctgactatcgcggcgagagcaaaagaagccggtcaggatccgcaggcttacaccgcagaagccctgaagaacggtgcaatccgctttgcggcggaacaaccggataatccgcagaacttcccgcgtaacctgtttatctggcgctccaacctgctcggctccgccggtaaaggtcatgagtatctgctgaaatacctgctcggtaccgaaaacggtctgctgggtaaagatctcggcgaacagggcagcgtgaaaccggaagaagcggaatgggtggataatgccccggaagggaaagttgatctggtggtgacactcgatttccgtatgtccagcacctgtctgttctcggatatcgtgctgccgaccgctacctggtatgaaaaagatgatatgaacacttcggatatgcatccgttcattcatccgctgactgccgctgttgacccggcctgggaatccaaaaccgactgggaaatctacaaagggatcgccaaatccttctctgaactctgcccgggccacctgggtaaagagacggatattgtcactctgccaatccagcatgactccgccgccgaaatggcgcagccgtttgatgtgaaggactggaaaaaaggcgaatgtgacctgatcccggggaaaaccgcaccgcacctgatggtggtggagcgcgattatccgaacacctatgcccgctttacctcgctgggaccgctgatggataaactcggtaacggcggcaaaggtatcagctggaatactcaggaagaagtcgatttcctgaaaaaacttaaccgcacccgcactgaaggcgcggcggaaggccgtccggcgattgaaaccgcgattgatgcggcagaagtcgtgctgtcactggcaccggaaaccaacggtcatgtggcggtgaaagcctgggatgcgctcggtaaagtgaccggccgcgaccatacgcatcttgccatccataaagaagatgaaaaaatccgcttccgcgacatcgtggcgcagccgcgcaaaatcatctccagcccgacctggtccggcctcgaagatgagcatgtctcttataacgcgggttacaccaacgttcacgagatgatcccgtggcgtaccctgagcggccgtcagcagttgtatcaggatcatgaatggatgcgtgcattcggtgaggcacttgtggtgtaccgtccaccggtggatacccgtgcggcacaaccgctgctgggcgcgaaaccaaacggctatccggagaaagccctgaacttcctgaccccgcaccagaaatggggtattcactccacctacagcgacaaccagctgatgctgaccctcggccgtggtggtccggtggtatggctgagtgaggacgatgcccgctcgctgggaattgaggataacgactggatcgaagccttcaacagcaacggcgcactgactgcccgtgcaattgtcagccagcgtatcccggacggcatgatctttatgtatcacgcccaggagcgtcagattaacctgccgggctcggaagtgaccggtatgcgaggcggtattcataactccgtcacccgtgtctgtccgaaaccgacccatatgatcggcggctacagccacctggcatacagctttaactattacggcactgtcggctccaaccgcgacgagtttgtggtggtccgcaaaatgaaaaatgtggactggctcgacggtgagcaggatggttatcaacagaccctgagcgggcaggagaaagcataa

SEQ ID NO: 6802 - protein, 1253 aa, Citrobacter koseri
  misc_feature (491)..(491): Xaa can be any naturally occurring amino acid
MSKFLDRFRYFKQRGETFSGNHGQELNVNRDWEDGYRSRWQHDKIVRSTHGVNCTGSCSWKIYVKNGLVTWETQQTDYPRTRPDLPDHEPRGCPRGASYSWYLYSANRVKYPMVRKRLIRLWREAKAQHADPVDAWASIINDEAKAKSYKQARGRGGFVRSDWQEVNEMIAAANIVTAKQFGPDRIIGFSPIPAMSMVSYASGARYLSLIGGACLSFYDWYCDLPPASPQTWGEQTDVPESADWYNSSYLIAWGSNVPQTRTPDAHFFTEVRYKGTKTVAITPDYAEIAKLCDQWLNPKQGTDSAVALAMGHVILNEFHAKRQAEYFTNYVRTYSDMPMLVMLDPRAEGGYVPGRMLRASDLVDSLGEKENAEWKTIAIDENSQQLVAPQGSIGFRWDKSRKWNLEPRDGKSGDEITMQLSLLDKHDEVADVAFPYFGGIENEFFEGVALDEVLMHKLPVKVVRLADGSEVRVASVFDLTLANYGIDRGLXDVNCAADYSEIKAYTPAWAEKVTGVSQHHISRIAREFADNAEKTHGRSMVIVGAGINHWYHMDMTYRGIINMLVFCGCVGQSGGGWSHYVGQEKLRPQTGWLPLAFGLDWSRPPRHMNSTSFFYNHSSQWRYETVQPQELLSPLADKSRFSGSLLDFNIRAERMGWLPSAPQLNVNPLTIAARAKEAGQDPQAYTAEALKNGAIRFAAEQPDNPQNFPRNLFIWRSNLLGSAGKGHEYLLKYLLGTENGLLGKDLGEQGSVKPEEAEWVDNAPEGKVDLVVTLDFRMSSTCLFSDIVLPTATWYEKDDMNTSDMHPFIHPLTAAVDPAWESKTDWEIYKGIAKSFSELCPGHLGKETDIVTLPIQHDSAAEMAQPFDVKDWKKGECDLIPGKTAPHLMVVERDYPNTYARFTSLGPLMDKLGNGGKGISWNTQEEVDFLKKLNRTRTEGAAEGRPAIETAIDAAEVVLSLAPETNGHVAVKAWDALGKVTGRDHTHLAIHKEDEKIRFRDIVAQPRKIISSPTWSGLEDEHVSYNAGYTNVHEMIPWRTLSGRQQLYQDHEWMRAFGEALVVYRPPVDTRAAQPLLGAKPNGYPEKALNFLTPHQKWGIHSTYSDNQLMLTLGRGGPVVWLSEDDARSLGIEDNDWIEAFNSNGALTARAIVSQRIPDGMIFMYHAQERQINLPGSEVTGMRGGIHNSVTRVCPKPTHMIGGYSHLAYSFNYYGTVGSNRDEFVVVRKMKNVDWLDGEQDGYQQTLSGQEKA

SEQ ID NO: 6803 - DNA, 564 bp, Citrobacter koseri
  misc_feature (457)..(457): n is a, c, g or t
atgagacacacactccgcgccgggcttctgctcccggcgctgctgacagccgcactgccgttgcgggcggcagtaccgccgcccggcattcagagcggcgacctggttttccgtgacggcggcgaagccatcagtgacattgtcagaagtatcgataacagcggtttcagccatgtcggcgttgttgatatcacgcctgaagggacttatgttatccacgccaccccgcaggagcacccggacggtatcagcggcgtgaaccgcgatccccttgatttctttattgaacacgccaaagacggacaagtagcctggtatgccgtacaggcggacagcgaaaatcaccaccgcgcccgtgataatgcccttgcgcggctcggcacgcctttcagcatcaacccgcaggacggactgtactgcacgcaactggcagcagacgcctggcaggcaaccgggntcaccatcatcaccggaaaaacccgtctgagtttaccgctggcggaagaaccgttaatcttaccggaaaatattacccgctcgccgcaactgcgccgtattcagtaa

SEQ ID NO: 6804 - protein, 187 aa, Citrobacter koseri
  misc_feature (153)..(153): Xaa can be any naturally occurring amino acid
MRHTLRAGLLLPALLTAALPLRAAVPPPGIQSGDLVFRDGGEAISDIVRSIDNSGFSHVGVVDITPEGTYVIHATPQEHPDGISGVNRDPLDFFIEHAKDGQVAWYAVQADSENHHRARDNALARLGTPFSINPQDGLYCTQLAADAWQATGXTIITGKTRLSLPLAEEPLILPENITRSPQLRRIQ

SEQ ID NO: 6805 - DNA, 1308 bp, Citrobacter koseri
  misc_feature (761)..(761): n is a, c, g or t
atgatcactaaatggttgtccgggacgccggaggtaaaaacggataccggcgggtatcagcgggcggggaaatacgtggttgcttccggtcttgccggttttctgttgtgggcgggattcgccccgctggatcagggagttgccgcatcgggaacggttgtgatcgccggtaatatcaagcaggtgcagtctccggcggatggcgtgatttctgcgatttatgtgcagaacggtcagagggcggaaaaagatcaggtactggtacggctgcgcccggtgcagtctcaggctcaggcggtgtcgctggcagagcagctcgacagcacattgctgatccaacggcggctggaggcagagctgcgcggtgaagcggcatttaccccggcggcggatgatgtcttttatgcgccgcccgcgtatggccgggtacagttacaggcacagaatgcactgcttacagaccggcggcttgaactggagagcgagattcaggcccgccgggtcacggttgacggcctgacacagcggcttatcactctgcgggagattgcccgcagtactgcgcaacaggcggacagcctgacggcacaggcggtaaacctgaaatcgctggcggatgagggatatctgccgcgccaccgttatcaggaaatccggcgggaaagtgcggcactgcgcaatcaggcgggtgacgccaggctacagataagccgtgcggaggaagaaaaatccgcacagacagagcagatcacacagagacnggcggcttttcacggcgggatccgcgaggagttatcacgtttgtcagttcagcgcagtgagctgaaaaaacaacagattatcgaaaacgagcggctggaacagcatgtcattaccgcgccggtgaccggtactgttatggatgtgtccgtgtttaccgcaggcggtgtggtgaaagccggggaaaaactgatgtcggtggtgccggaacaacagacactgattattgaaggtaaattatcaccgcagtggatagataaagtcacccccggtcagtctgcggatctgctgtttaccgcattcaatcagaacctgaccccaaaactgcgcggcgaactgacgatgatttccgccgatcgtctgataaatccggcaaacggggagccttattatcagattcagatcgctgtgccggaaacggcggcggctcaggtgatcaaacccggtatgcctgctgagatttttatccgcaccggtgaacggtcactgctcagttatctgtttaagcctgtaactgaccggctctttttcgcgctgaccgaggagtga

SEQ ID NO: 6806 - protein, 435 aa, Citrobacter koseri
  misc_feature (254)..(254): Xaa can be any naturally occurring amino acid
MITKWLSGTPEVKTDTGGYQRAGKYVVASGLAGFLLWAGFAPLDQGVAASGTVVIAGNIKQVQSPADGVISAIYVQNGQRAEKDQVLVRLRPVQSQAQAVSLAEQLDSTLLIQRRLEAELRGEAAFTPAADDVFYAPPAYGRVQLQAQNALLTDRRLELESEIQARRVTVDGLTQRLITLREIARSTAQQADSLTAQAVNLKSLADEGYLPRHRYQEIRRESAALRNQAGDARLQISRAEEEKSAQTEQITQRXAAFHGGIREELSRLSVQRSELKKQQIIENERLEQHVITAPVTGTVMDVSVFTAGGVVKAGEKLMSVVPEQQTLIIEGKLSPQWIDKVTPGQSADLLFTAFNQNLTPKLRGELTMISADRLINPANGEPYYQIQIAVPETAAAQVIKPGMPAEIFIRTGERSLLSYLFKPVTDRLFFALTEE

SEQ ID NO: 6807 - DNA, 483 bp, Citrobacter koseri
  misc_feature (299)..(299): n is a, c, g or t
atgcgcctgtctcattcatttctaagaggaaccgttgtactgctgctgtgcgggatattaagcggctgcggggtgttttatggtgccatgtgcggcggtatggctatatttacgccgtcagaatcggtgaccaaaatcccggtaccggatgcggtggccggtcaactgtatgatcaaacaattgaaatcgtccggcacgcagggatgatcccgttttatgtcagtgagaaaccggactggatgacggtcacactgatgtcaaaaaatgaggccggggaatggataccgcttatcaccgnagaggagtggcagacacgggtgatgaaagccgatcagcgcccgctgatcgctgcccgtttgcagggaacaccggcggtgcgcgggaaagtcagggtaaatatcaaagggatgtcttaccgcaacatgtgcggaaactcagacccggtctattctgtgcggctggccgtgaaaaaagcggagtaa

SEQ ID NO: 6808 - protein, 160 aa, Citrobacter koseri
  misc_feature (100)..(100): Xaa can be any naturally occurring amino acid
MRLSHSFLRGTVVLLLCGILSGCGVFYGAMCGGMAIFTPSESVTKIPVPDAVAGQLYDQTIEIVRHAGMIPFYVSEKPDWMTVTLMSKNEAGEWIPLITXEEWQTRVMKADQRPLIAARLQGTPAVRGKVRVNIKGMSYRNMCGNSDPVYSVRLAVKKAE

SEQ ID NO: 6809 - DNA, 483 bp, Citrobacter koseri
  misc_feature (317)..(317): n is a, c, g or t
atgcgcctgtctcattcatttctaagaggaaccgttgtactgctgctgtgcgggatattaagcggctgcggggtgttttatggtgccatgtgcggcggtatggctatatttacgccgtcagaatcggtgaccaaaatcccggtaccggatgcggtggccggtcaactgtatgatcaaacaattgaaatcgtccggcacgcagggatgatcccgttttatgtcagtgagaaaccggactggatgacggtcacactgatgtcaaaaaatgaggccggggaatggataccgcttatcaccgaagaggagtggcagacacnggtgatgaaagccgatcagcgcccgctgatcgctgcccgtttgcagggaacaccggcggtgcgcgggaaagtcagggtaaatatcaaagggatgtcttaccgcaacatgtgcggaaactcagacccggtctattctgtgcggctggccgtgaaaaaagcggagtaa

SEQ ID NO: 6810 - protein, 160 aa, Citrobacter koseri
  misc_feature (106)..(106): Xaa can be any naturally occurring amino acid
MRLSHSFLRGTVVLLLCGILSGCGVFYGAMCGGMAIFTPSESVTKIPVPDAVAGQLYDQTIEIVRHAGMIPFYVSEKPDWMTVTLMSKNEAGEWIPLITEEEWQTXVMKADQRPLIAARLQGTPAVRGKVRVNIKGMSYRNMCGNSDPVYSVRLAVKKAE

SEQ ID NO: 6811 - DNA, 1029 bp, Morganella morganii
  misc_feature (961)..(961): n is a, c, g or t
atgaatattatcaaaattgcagcagggatttcggcctgttttgctgccggattattgctggcatacctgaacgtgccgatggcactgatgttcggccccatcattctgattattattgtgcaccgtttcaatgtttcgctcactattcctaagggaacattaacctttgttcagatggtgctcggaacatccgtcgggctgatgtttacccgtgtcgatctcagtcagtttgaccatcttctgctgattatgctcactatggtatcgtgcctggcggtgcagtttaccgtcagtttcctctggtttcgcaaacgggtggggtggtctgttcaggaatctctgctgggggcggtgccgggggcaatggcggcgattctggccctgatggatcacaccggtacaccgccgcagaaggtggtgatttctcatactatccgcctgattattctgattatgctggcgggcgtggtggtcggcagtgatcatcctgtcccgccgcccgcggatattccgccgcagagtctggtgtccgtgctgtggctgctggtgattgcggtgtgcgggtatctgtccggcaaagcgctggaaaaaatcaatgtcccggcaccgtttatgctgacatcactgggcacggcgattgcggtacagagcatggtgagtacttacattgttttcccgctgccgctgaatgatatcagtatgacgctgatcggcatgtatatcgggagctattttgttctgtttccgctgaggtcactgctgcgcaatatggtgacgtccgctcaggtggtgctgatcaatattgtgctgactgcactgattgcattcggggcgtctcacctgaccggtttttccttcccgatgctgctgctctcctgggcgcccggcagcatggaagccatgacattcgccgcaattgcgatggggatagatgcgggttttgtcatgcttaaccatattntccgcatgctgattatccagagggtgccgtcagtggtgctgtatattcaggaacggcggagtaagtaa

SEQ ID NO: 6812 - protein, 342 aa, Morganella morganii
  misc_feature (321)..(321): Xaa can be any naturally occurring amino acid
MNIIKIAAGISACFAAGLLLAYLNVPMALMFGPIILIIIVHRFNVSLTIPKGTLTFVQMVLGTSVGLMFTRVDLSQFDHLLLIMLTMVSCLAVQFTVSFLWFRKRVGWSVQESLLGAVPGAMAAILALMDHTGTPPQKVVISHTIRLIILIMLAGVVVGSDHPVPPPADIPPQSLVSVLWLLVIAVCGYLSGKALEKINVPAPFMLTSLGTAIAVQSMVSTYIVFPLPLNDISMTLIGMYIGSYFVLFPLRSLLRNMVTSAQVVLINIVLTALIAFGASHLTGFSFPMLLLSWAPGSMEAMTFAAIAMGIDAGFVMLNHIXRMLIIQRVPSVVLYIQERRSK

SEQ ID NO: 6813 - DNA, 1029 bp, Citrobacter koseri
  misc_feature (253)..(253): n is a, c, g or t
atgaatattatcaaaattgcagcagggatttcggcctgttttgctgccggattattgctggcatacctgaacgtgccgatggcactgatgttcggccccatcattctgattattattgtgcaccgtttcaatgtttcgctcactattcctaagggaacattaacctttgttcagatggtgctcggaacatccgtcgggctgatgtttacccgtgtcgatctcagtcagtttgaccatcttctgctgattatgntcactatggtatcgtgcctggcggtgcagtttaccgtcagtttcctctggtttcgcaaacgggtggggtggtctgttcaggaatctctgctgggggcggtgccgggggcaatggcggcgattctggccctgatggatcacaccggtacaccgccgcagaaggtggtgatttctcatactatccgcctgattattctgattatgctggcgggcgtggtggtcggcagtgatcatcctgtcccgccgcccgcggatattccgccgcagagtctggtgtccgtgctgtggctgctggtgattgcggtgtgcgggtatctgtccggcaaagcgctggaaaaaatcaatgtcccggcaccgtttatgctgacatcactgggcacggcgattgcggtacagagcatggtgagtacttacattgttttcccgctgccgctgaatgatatcagtatgacgctgatcggcatgtatatcgggagctattttgttctgtttccgctgaggtcactgctgcgcaatatggtgacgtccgctcaggtggtgctgatcaatattgtgctgactgcactgattgcattcggggcgtctcacctgaccggtttttccttcccgatgctgctgctctcctgggcgcccggcagcatggaagccatgacattcgccgcaattgcgatggggatagatgcgggttttgtcatgcttaaccatattctccgcatgctgattatccagagggtgccgtcagtggtgctgtatattcaggaacggcggagtaagtaa

SEQ ID NO: 6814 - protein, 342 aa, Citrobacter koseri
  misc_feature (85)..(85): Xaa can be any naturally occurring amino acid
MNIIKIAAGISACFAAGLLLAYLNVPMALMFGPIILIIIVHRFNVSLTIPKGTLTFVQMVLGTSVGLMFTRVDLSQFDHLLLIMXTMVSCLAVQFTVSFLWFRKRVGWSVQESLLGAVPGAMAAILALMDHTGTPPQKVVISHTIRLIILIMLAGVVVGSDHPVPPPADIPPQSLVSVLWLLVIAVCGYLSGKALEKINVPAPFMLTSLGTAIAVQSMVSTYIVFPLPLNDISMTLIGMYIGSYFVLFPLRSLLRNMVTSAQVVLINIVLTALIAFGASHLTGFSFPMLLLSWAPGSMEAMTFAAIAMGIDAGFVMLNHILRMLIIQRVPSVVLYIQERRSK

SEQ ID NO: 6815 - DNA, 960 bp, Morganella morganii
  misc_feature (865)..(865): n is a, c, g or t
atgcaacctatctccgtgactatcctgaccggtttcctgggtgccggtaaaaccacactgctgcgccatattctccacgaggagcacgggcagaaaattgctgtgattgaaaatgaattcggcgaggtgccgatcgatgatgaaattatcggtgaccgcgccacgcagataaaaaccctgagcaacgggtgtatctgctgcagccgctcaagtgagctggaagatgcgctgctcgacctgtgtgaaaacctggacagcggcaaaatcgattttgaccgcctggtgattgaatgcaccggtatggctgatcccggcccgattacacagaccttcttctccaatgaaaaattgtgtgagcgctatgtgctggacggcattatcacgctggtggatgcagtacatgcacagcagcagctggatcagttcactatcgcccaggcgcagattggttacgcggatcgcattctgctgaccaaaacggacgttgagccggataatgaggcgctgctcgcccggttacagcggattaatgccaaagcgccggtgtataaggtgattaacggcgatatcgacatgaatctgctgtttaatgtcggcggttttatgctggatgataatgtggaggtcagcaagccgctgttccgctttgcaccgaaacagcagaatgacattcagtctctggtgatcaccatggataaaccggtggaaatcagtgccatttcccgcgcgatggagacccttctgctcagctatgccgataatatgctgcgttacaaagggttactctggattaaagatgagccgcgccgcctgttattccagggcgttcagcgtctttacagtgcggattttgaccgcgaatggngtgaggatgatgtaaaacagagtgtgctgatttttatcggcatgcaactgccggagcaggaaatccgtaatgcgtttgccacgctgacggcatga

SEQ ID NO: 6816 - protein, 319 aa, Morganella morganii
  misc_feature (289)..(289): Xaa can be any naturally occurring amino acid
MQPISVTILTGFLGAGKTTLLRHILHEEHGQKIAVIENEFGEVPIDDEIIGDRATQIKTLSNGCICCSRSSELEDALLDLCENLDSGKIDFDRLVIECTGMADPGPITQTFFSNEKLCERYVLDGIITLVDAVHAQQQLDQFTIAQAQIGYADRILLTKTDVEPDNEALLARLQRINAKAPVYKVINGDIDMNLLFNVGGFMLDDNVEVSKPLFRFAPKQQNDIQSLVITMDKPVEISAISRAMETLLLSYADNMLRYKGLLWIKDEPRRLLFQGVQRLYSADFDREWXEDDVKQSVLIFIGMQLPEQEIRNAFATLTA

SEQ ID NO: 6817 - DNA, 711 bp, Morganella morganii
  misc_feature (358)..(358): n is a, c, g or t
atgaaaacaacacaaactgcagctgatcttgccagagagaaacttgatgccatgctgaccgccggcattatcacgcccggtgacaagctgcccgcagaacgtccgctgacagaacaactcggtatcaaccggatgtcactgcgccaggcactgctcagcctggaaaatgacggaaaaatcttccgcaaaaaccgcagcggatggttcgctgccctgccggtcttcaattacaacccgaaatccccggcaagttttaatcaggcggcaaaagcacagggacgggtaccgtcatgggaatacaccgacaagctgacagtcactgatgcccctgcggagattaccggtaaattcggccttncggccggtgatgcggtgtatctcattacaggatggggggcactggacgggcataaagtgttctggcaccagacctatattaacccggctgccggtccggattttaccgcaaaactggataaccactctttcgcggcaatctgggaagaaaaatataatatcaccaccacgactgccggactggcattcaaaccagcccggatgccggaaacagccagtaaggccatcggctgtaccgcgaattcccccggtatccgggtggaaaaataccgctgtgatgcggaacataatatcgttcaaatcgacattgagtactggcggtttgaatctgtttatttttttgttgagctttag

SEQ ID NO: 6818 - protein, 236 aa, Morganella morganii
  misc_feature (120)..(120): Xaa can be any naturally occurring amino acid
MKTTQTAADLAREKLDAMLTAGIITPGDKLPAERPLTEQLGINRMSLRQALLSLENDGKIFRKNRSGWFAALPVFNYNPKSPASFNQAAKAQGRVPSWEYTDKLTVTDAPAEITGKFGLXAGDAVYLITGWGALDGHKVFWHQTYINPAAGPDFTAKLDNHSFAAIWEEKYNITTTTAGLAFKPARMPETASKAIGCTANSPGIRVEKYRCDAEHNIVQIDIEYWRFESVYFFVEL

SEQ ID NO: 6819 - DNA, 1386 bp, Morganella morganii
  misc_feature (773)..(773): n is a, c, g or t
atgaataaggcacaaaaacaggtcttcgtaatcgcgggcaccagcagcggctgcggaaaaaccaccatcaccctcgggatcatgcgggcactcagtgcacgcggattacgtgtccagccctgcaaagtcggccctgattacctcgacagcagctggcataccgccgtcaccggcgtgccttcccgtaacctggatgcctttatgctgccggagtccgttctgaccccgcagttccgtcattatatgcaggacaaagacgccggtgtgattgagggcgtgatgggcctgtatgacggcttcggtactgatccccactattgcagcactgccgcgatggcaaaacagctgaactgcccggtgattatgctggtcgacggcaaagcggtttccacctcaattgccgccacggtgatgggatttcagcattttgatccgtcactgaatatcgccggggtgctgattaaccgggttaacagtgacagccattttcagcttctgaaacacgcgattgaacattactgccatgtgccggtgatcggctacgttccggtgatgagtgatattgaactcccttcccgtcacctgggactgatcccgccgcaggagcaggcacagcagactgaacgctggcagcgcctggccgatcagatagaaaaaactgttgatgtggataagctgctttccctgacacactggcaggcaccggcagacagcataccaatacagctcgccacaccgggtgccgggcgcgggctgactgtcgccgtggcggntgatgccgcctttaacttctactatcctgataatctcgatttactgcgtcagagcggcgctgagattgtcacattcagcccgctcaatgacagcaccctgccggatccgtgccatatgatttacatcggcggcggttatccggaagtctatgctgaaaaactttcatctaacaccgcaatgcgggacgcactgctggcagcacatcagcgcggtattcctgtttatgcggagtgcggcggattgatgtatctcggtgaaaccctgacagacagcaacggcaacaccttcccgatgaccggcatcattgccggacacagcaccatgggtaaccgtctgaaacgctttggttactgcgaaggtaccgcactgacagacaccacgctggtttgtgccggtgaacgcctgcgcggccacgagtttcattattctgattttgagactgatctgccgcctgcttttgagtttatcaaagagcgcgacggcgaaatcctcaaacgctggcgcggcggttatcaggtcggaaatacctttgccggatatctgcatgtgcattttgcccggcgtccggggttattggatcactggtttgccctggcacggagtgtgttatga

SEQ ID NO: 6820 - protein, 461 aa, Morganella morganii
  misc_feature (258)..(258): Xaa can be any naturally occurring amino acid
MNKAQKQVFVIAGTSSGCGKTTITLGIMRALSARGLRVQPCKVGPDYLDSSWHTAVTGVPSRNLDAFMLPESVLTPQFRHYMQDKDAGVIEGVMGLYDGFGTDPHYCSTAAMAKQLNCPVIMLVDGKAVSTSIAATVMGFQHFDPSLNIAGVLINRVNSDSHFQLLKHAIEHYCHVPVIGYVPVMSDIELPSRHLGLIPPQEQAQQTERWQRLADQIEKTVDVDKLLSLTHWQAPADSIPIQLATPGAGRGLTVAVAXDAAFNFYYPDNLDLLRQSGAEIVTFSPLNDSTLPDPCHMIYIGGGYPEVYAEKLSSNTAMRDALLAAHQRGIPVYAECGGLMYLGETLTDSNGNTFPMTGIIAGHSTMGNRLKRFGYCEGTALTDTTLVCAGERLRGHEFHYSDFETDLPPAFEFIKERDGEILKRWRGGYQVGNTFAGYLHVHFARRPGLLDHWFALARSVL

SEQ ID NO: 6821 - DNA, 1386 bp, Citrobacter koseri
  misc_feature (704)..(704): n is a, c, g or t
atgaataaggcacaaaaacaggtcttcgtaatcgcgggcaccagcagcggctgcggaaaaaccaccatcaccctcgggatcatgcgggcactcagtgcacgcggattacgtgtccagccctgcaaagtcggccctgattacctcgacagcagctggcataccgccgtcaccggcgtgccttcccgtaacctggatgcctttatgctgccggagtccgttctgaccccgcagttccgtcattatatgcaggacaaagacgccggtgtgattgagggcgtgatgggcctgtatgacggcttcggtactgatccccactattgcagcactgccgcgatggcaaaacagctgaactgcccggtgattatgctggtcgacggcaaagcggtttccacctcaattgccgccacggtgatgggatttcagcattttgatccgtcactgaatatcgccggggtgctgattaaccgggttaacagtgacagccattttcagcttctgaaacacgcgattgaacattactgccatgtgccggtgatcggctacgttccggtgatgagtgatattgaactcccttcccgtcacctgggactgatcccgccgcaggagcaggcacagcagactgaacgctggcagcgcctggccgatcagatagaaaaaactgttgatgtggataagctgctttccctgacacactggcaggcacnggcagacagcataccaatacagctcgccacaccgggtgccgggcgcgggctgactgtcgccgtggcggatgatgccgcctttaacttctactatcctgataatctcgatttactgcgtcagagcggcgctgagattgtcacattcagcccgctcaatgacagcaccctgccggatccgtgccatatgatttacatcggcggcggttatccggaagtctatgctgaaaaactttcatctaacaccgcaatgcgggacgcactgctggcagcacatcagcgcggtattcctgtttatgcggagtgcggcggattgatgtatctcggtgaaaccctgacagacagcaacggcaacaccttcccgatgaccggcatcattgccggacacagcaccatgggtaaccgtctgaaacgctttggttactgcgaaggtaccgcactgacagacaccacgctggtttgtgccggtgaacgcctgcgcggccacgagtttcattattctgattttgagactgatctgccgcctgcttttgagtttatcaaagagcgcgacggcgaaatcctcaaacgctggcgcggcggttatcaggtcggaaatacctttgccggatatctgcatgtgcattttgcccggcgtccggggttattggatcactggtttgccctggcacggagtgtgttatga

SEQ ID NO: 6822 - protein, 461 aa, Citrobacter koseri
  misc_feature (235)..(235): Xaa can be any naturally occurring amino acid
MNKAQKQVFVIAGTSSGCGKTTITLGIMRALSARGLRVQPCKVGPDYLDSSWHTAVTGVPSRNLDAFMLPESVLTPQFRHYMQDKDAGVIEGVMGLYDGFGTDPHYCSTAAMAKQLNCPVIMLVDGKAVSTSIAATVMGFQHFDPSLNIAGVLINRVNSDSHFQLLKHAIEHYCHVPVIGYVPVMSDIELPSRHLGLIPPQEQAQQTERWQRLADQIEKTVDVDKLLSLTHWQAXADSIPIQLATPGAGRGLTVAVADDAAFNFYYPDNLDLLRQSGAEIVTFSPLNDSTLPDPCHMIYIGGGYPEVYAEKLSSNTAMRDALLAAHQRGIPVYAECGGLMYLGETLTDSNGNTFPMTGIIAGHSTMGNRLKRFGYCEGTALTDTTLVCAGERLRGHEFHYSDFETDLPPAFEFIKERDGEILKRWRGGYQVGNTFAGYLHVHFARRPGLLDHWFALARSVL

SEQ ID NO: 6823 - DNA, 2616 bp, Morganella morganii
  misc_feature (248)..(248): n is a, c, g or t
atgagcgacaatgccaaagaaatcttgcccgttaacatcgaagaggagctgaaaagctcgtatctggattacgccatgtccgttattgtcggacgcgcgctccccgatgtcagggatggtctgaaaccggttcatcgccgcgtattattcgcgatgaaagaactgggtaatgactggaacaaagcctataaaaaatctgcccgtgtggtcggggatgtgatcggtaaatatcacccccatggtgacantgctgtgtatgaaacgattgtccgcctggctcagccgttctcaatgcgctatatgctggtggatggtcagggtaactttggttcaatcgacggtgattccgcagcggcaatgcgttatacggaagtccgtatggcgaaaattgcccatgaactgttagccgacatcgacaaagaaaccgtggattttgtaccgaactatgacggtaccgaaatgatcccggatgtgatgccgacccgcatcccgaacctgctggtgaatggttcatccggtattgctgtcgggatggcaaccaatattccgccgcataacctgggtgaagtcattgacggctgccttgcctatattgatgatgaagatatcagcatcgaaggtctgatggagcacatcccggggccggacttcccgactgcggcgattatcaacggccgccgcggtattctcgatgcttaccgcaccggacgcggcaaaattcatatccgtgcccgcgctgaagtggaaacggatgaaaaaaccggccgcgaaaccattatcgttaatgaaattccgtatcaggtgaacaaagcccgcctgattgagaaaatcgccgagctggttaaagagaaacgtctggaaggtatcagcgcactgcgtgatgaatccgataaagacggtatgcgcattgtgattgaagtcaaacgcgatgcggtcggtgaagtagtactgaacaacctttatctgctgacacagatgcagaccacgtttggtatcaatatggttgccctgcatcagggacagccgaagatcctcaatctgaaagaaattctcagtgcgtttgtgcgccaccgccgtgaagtggtgacccgccggacaatctacgaattacgtaaagcccgtgaacgcgcccatatcctcgaaggtctggcgattgcactggccaatatcgacccgattatcgagcttatccgccgtgcgccgacgcctgcggaagcaaaagccgggttactggcacaggcatgggaactgggtacggttgccgccatgctggccggtgccggtgatgatgccgcacgtccggaaggcctggatgagcagttcggtatccgcgatggtctgtatcatctgaccgaagttcaggctcaggcgattctggatctgcgtctgcagaaactgaccggtctggagcatgaaaaactgctcgacgaataccgcgagttactggaactgattgccggtctgctgcatatcctgcaaagccctgagcgtctgatggaagtcatccgtgaagagctggtggcagtgaaagagcagttcaacgataagcgccgtactgatatcacagaaaacacagcggatatcaacatcgaagatctgatcagtcaggaagacgtggtggtgacactgtcccatcagggctatgtgaagtatcagccgctgaccgactatgaagcccagcgccgcggcgggaaaggtaaatctgccgcccgtatcaaagaagaagactttatcgaacgtctgctggtggcaaacacccacgacaccattctctgcttctccaacaaagggaagctgtactggctgaaagtgtatcagttaccggaagccagccgtggtgcgcgcggtcgtccgattatcaacatattaccgctggaccaggaacagaacgagcgtatcactgctattctgccggtccgtgaatatgaagaaggtaagtttgtctttatggcgaccgccagtggtaccgtgaagaaaacatccctgcaggacttcagccgtccgcgtaacgccggtattatcgccgtcaacctcaatgagggtgatgagctgattggcgttgacctgactgacggcagcaacgaagtgatgctgttctctgctgacggtaaagtcgtccgctttgcggaagatgctgtccgtgccatggggcgtaccgccaccggtgtgcgcggtatccgtctgggtgacgatgacgcggtcgtgtcactgattattccgcgcggtgaaggtgaaattctgacggtcaccgaaaacggctacggcaagcggactgcggaagcggagtatccgaccaaatcccgcgccactcagggggttatctccattaaagtgagtgagcgtaacgggaaagtcgtgggtgcaatccaggtcggtgcggatgatcagattatgatgatcaccgatgccggtactctggtccgcacccgcgtctctgaagtcagtatcgtgggccgtaatacccagggtgtgacgctgatccgtaccggagaagaagagaaagtggtcggtctgcagcgtgttgcggagccggaagaggatgaaaatgatttctctgaagacggtgaagtgacggatgcggcatctgatgataatgcagaagagaataacgattaa

SEQ ID NO: 6824 - protein, 871 aa, Morganella morganii
  misc_feature (83)..(83): Xaa can be any naturally occurring amino acid
MSDNAKEILPVNIEEELKSSYLDYAMSVIVGRALPDVRDGLKPVHRRVLFAMKELGNDWNKAYKKSARVVGDVIGKYHPHGDXAVYETIVRLAQPFSMRYMLVDGQGNFGSIDGDSAAAMRYTEVRMAKIAHELLADIDKETVDFVPNYDGTEMIPDVMPTRIPNLLVNGSSGIAVGMATNIPPHNLGEVIDGCLAYIDDEDISIEGLMEHIPGPDFPTAAIINGRRGILDAYRTGRGKIHIRARAEVETDEKTGRETIIVNEIPYQVNKARLIEKIAELVKEKRLEGISALRDESDKDGMRIVIEVKRDAVGEVVLNNLYLLTQMQTTFGINMVALHQGQPKILNLKEILSAFVRHRREVVTRRTIYELRKARERAHILEGLAIALANIDPIIELIRRAPTPAEAKAGLLAQAWELGTVAAMLAGAGDDAARPEGLDEQFGIRDGLYHLTEVQAQAILDLRLQKLTGLEHEKLLDEYRELLELIAGLLHILQSPERLMEVIREELVAVKEQFNDKRRTDITENTADINIEDLISQEDVVVTLSHQGYVKYQPLTDYEAQRRGGKGKSAARIKEEDFIERLLVANTHDTILCFSNKGKLYWLKVYQLPEASRGARGRPIINILPLDQEQNERITAILPVREYEEGKFVFMATASGTVKKTSLQDFSRPRNAGIIAVNLNEGDELIGVDLTDGSNEVMLFSADGKVVRFAEDAVRAMGRTATGVRGIRLGDDDAVVSLIIPRGEGEILTVTENGYGKRTAEAEYPTKSRATQGVISIKVSERNGKVVGAIQVGADDQIMMITDAGTLVRTRVSEVSIVGRNTQGVTLIRTGEEEKVVGLQRVAEPEEDENDFSEDGEVTDAASDDNAEENND

SEQ ID NO: 6825 - DNA, 2616 bp, Morganella morganii
  misc_feature (249)..(249): n is a, c, g or t
atgagcgacaatgccaaagaaatcttgcccgttaacatcgaagaggagctgaaaagctcgtatctggattacgccatgtccgttattgtcggacgcgcgctccccgatgtcagggatggtctgaaaccggttcatcgccgcgtattattcgcgatgaaagaactgggtaatgactggaacaaagcctataaaaaatctgcccgtgtggtcggggatgtgatcggtaaatatcacccccatggtgacagngctgtgtatgaaacgattgtccgcctggctcagccgttctcaatgcgctatatgctggtggatggtcagggtaactttggttcaatcgacggtgattccgcagcggcaatgcgttatacggaagtccgtatggcgaaaattgcccatgaactgttagccgacatcgacaaagaaaccgtggattttgtaccgaactatgacggtaccgaaatgatcccggatgtgatgccgacccgcatcccgaacctgctggtgaatggttcatccggtattgctgtcgggatggcaaccaatattccgccgcataacctgggtgaagtcattgacggctgccttgcctatattgatgatgaagatatcagcatcgaaggtctgatggagcacatcccggggccggacttcccgactgcggcgattatcaacggccgccgcggtattctcgatgcttaccgcaccggacgcggcaaaattcatatccgtgcccgcgctgaagtggaaacggatgaaaaaaccggccgcgaaaccattatcgttaatgaaattccgtatcaggtgaacaaagcccgcctgattgagaaaatcgccgagctggttaaagagaaacgtctggaaggtatcagcgcactgcgtgatgaatccgataaagacggtatgcgcattgtgattgaagtcaaacgcgatgcggtcggtgaagtagtactgaacaacctttatctgctgacacagatgcagaccacgtttggtatcaatatggttgccctgcatcagggacagccgaagatcctcaatctgaaagaaattctcagtgcgtttgtgcgccaccgccgtgaagtggtgacccgccggacaatctacgaattacgtaaagcccgtgaacgcgcccatatcctcgaaggtctggcgattgcactggccaatatcgacccgattatcgagcttatccgccgtgcgccgacgcctgcggaagcaaaagccgggttactggcacaggcatgggaactgggtacggttgccgccatgctggccggtgccggtgatgatgccgcacgtccggaaggcctggatgagcagttcggtatccgcgatggtctgtatcatctgaccgaagttcaggctcaggcgattctggatctgcgtctgcagaaactgaccggtctggagcatgaaaaactgctcgacgaataccgcgagttactggaactgattgccggtctgctgcatatcctgcaaagccctgagcgtctgatggaagtcatccgtgaagagctggtggcagtgaaagagcagttcaacgataagcgccgtactgatatcacagaaaacacagcggatatcaacatcgaagatctgatcagtcaggaagacgtggtggtgacactgtcccatcagggctatgtgaagtatcagccgctgaccgactatgaagcccagcgccgcggcgggaaaggtaaatctgccgcccgtatcaaagaagaagactttatcgaacgtctgctggtggcaaacacccacgacaccattctctgcttctccaacaaagggaagctgtactggctgaaagtgtatcagttaccggaagccagccgtggtgcgcgcggtcgtccgattatcaacatattaccgctggaccaggaacagaacgagcgtatcactgctattctgccggtccgtgaatatgaagaaggtaagtttgtctttatggcgaccgccagtggtaccgtgaagaaaacatccctgcaggacttcagccgtccgcgtaacgccggtattatcgccgtcaacctcaatgagggtgatgagctgattggcgttgacctgactgacggcagcaacgaagtgatgctgttctctgctgacggtaaagtcgtccgctttgcggaagatgctgtccgtgccatggggcgtaccgccaccggtgtgcgcggtatccgtctgggtgacgatgacgcggtcgtgtcactgattattccgcgcggtgaaggtgaaattctgacggtcaccgaaaacggctacggcaagcggactgcggaagcggagtatccgaccaaatcccgcgccactcagggggttatctccattaaagtgagtgagcgtaacgggaaagtcgtgggtgcaatccaggtcggtgcggatgatcagattatgatgatcaccgatgccggtactctggtccgcacccgcgtctctgaagtcagtatcgtgggccgtaatacccagggtgtgacgctgatccgtaccggagaagaagagaaagtggtcggtctgcagcgtgttgcggagccggaagaggatgaaaatgatttctctgaagacggtgaagtgacggatgcggcatctgatgataatgcagaagagaataacgattaa

SEQ ID NO: 6826 - protein, 871 aa, Morganella morganii; identical to SEQ ID NO: 6824
  misc_feature (83)..(83): Xaa can be any naturally occurring amino acid

SEQ ID NO: 6827 - DNA, 627 bp, Citrobacter koseri
  misc_feature (40)..(40): n is a, c, g or t
atggacaaaaaaacacagggaacgacgatgaattaccagnttgttcctttttggatctattcaggaagagttgccttttttatattacttgcggtgcttaccggtttttggggcatgaatgcgtttctgctttatttgttatttcacggaattgtctggcaactggtggtttctctccgtttacatacattaaaagagaagggactggtttcccgcagccatgatatcagccactggatagtgtatgtttacagcataccggtgaaagaagagcgggcgattttaaaaaatccgtgttttgcacttgaacaaaatatgaaggattttttcttccgcctgctgttactgaaaggtatcactcaactgggttttattgcgctgttactggttcagtatatccggacagatgcggatattttcagcctgaccacactgtttgcgggattatccgccgttattatagccgtcatgctttaccggaccggtctgcttatccgtgcattatcagctaatgcgttttatacggaaaaactgcagtcagaaagtggttctttctggtatcagctctgttttatttcacatggctcagtgaaaacggcagggctggataaattactggcaatataa

SEQ ID NO: 6828 - protein, 208 aa, Citrobacter koseri
  misc_feature (14)..(14): Xaa can be any naturally occurring amino acid
MDKKTQGTTMNYQXVPFWIYSGRVAFFILLAVLTGFWGMNAFLLYLLFHGIVWQLVVSLRLHTLKEKGLVSRSHDISHWIVYVYSIPVKEERAILKNPCFALEQNMKDFFFRLLLLKGITQLGFIALLLVQYIRTDADIFSLTTLFAGLSAVIIAVMLYRTGLLIRALSANAFYTEKLQSESGSFWYQLCFISHGSVKTAGLDKLLAI

SEQ ID NO: 6829 - DNA, 3975 bp, Morganella morganii
  misc_feature (2612)..(2612): n is a, c, g or t
atggtgagtaccacaatgggcgtcagactggatgatgaaacccgtgagcggatcaaagccgcagcgcaaaaaattgatcgcacgccgcactggctgatcagacaggctatttttgattacctgactcagctcgattctctgccggacggcacactgcctgctgccggagcaccttccgcacaggaagatgaaacagtaccggctgagccgccggtcagctgccagccgtttctggaatttgccggtgatatcctgccgcaatccgtgacccgcgcagctatcacatccgcgtaccgtattccggagccggaagcggtcgctatgctgctgccgcaggcgcaactatccccggatgccgcacaggccacgcataaactggcttacggtctggcagaaaagctgcgtaatcagaaaaacagcagcggacgcgccggactggtacagggactgcttcaggaattctccctctcctcccaggaggggatcgcgctgatgtgcctggcagaagcactgcttcgtattcctgataaagccacccgtgatgtgctgatccgcgataaaatcagccacggtgactggaattctcacctcggccagagcaaatccatgtttgtcaatgccgccacctgggggctgctgttcaccggtaagctggttgccacgcataatgaagcgggactgagccgctcactgaaccgtatcctcggcaaaagcggtgaaccgctggtgcgcaaaggtgtggatatggcaatgcgcctgatgggcgagcagtttgttaccggtgaaaccatcgcccgtgcgctggcaaacgcccgtaaaaatgaagccaaaggcttccgctattcttacgatatgctgggcgaggccgcactgacggccgcagatgcacaggcctatctggtctcttatcagcaggctatccacgccatcggcaaagcctccgccggacgcggtatttatgaagggccgggcatctccatcaaactgtctgccctgcacccgcgctacagccgagcgcagtatgaccgcgtgatgtccgaactttatccgatcctgcgtgacctggtggtgatggcgcgtcagtacgatatcggaatcaatattgatgcggaagaagctgaccgcctggaaatctccctcgatttactggaaaaactctgttttgacccgcaactggcgggctggaacggcattggttttgttatccaggcctatcagaaacgctgcccggtggtggtggattatctgattgacctggcatcgcgcagtcagcgccgtctgatgatccgtctggtaaaaggtgcttactgggacagcgaagtcaaacgcgcccaggtcgacgggctggaaggctatccggtgtatacccgcaaagtttatacggatatctcttacctcgcctgtgcccgtaaactgctgtcagtgccaaatctgatttatccgcagtttgccacccacaacgcccacaccttatccgctatctaccaactggcgggcaataactattatcccggtcagtatgagttccagtgtctgcacggcatgggtgaaccgctgtatgagcaggtggtcggcaaagtggcggacggcaaactgaaccggccgtgccgcgtgtatgcaccggttggtacccatgaaaccctgctggcttatctggtccgccgcctgctggaaaacggcgcgaatacctcctttgtcaaccggatcgccgacggcactattccgctggagatgctggtggaagacccggttgcggcagttcaggcaatggccgccaaagaaggcgctgtcggcctgccgcatccgaaaatcccgctgccgcgcaatctgtacggcaatacgcgggtcaatgccgccggtctggatctgagtaacgagcaccgtctggcgtcgctgtcgagtgccctgctcagccacgccggggataatctgctcagtgaaccactgaccggcggaacatttacaccgtccgcaccggcagagccgcaaccggtcagaaacccggcgaatcatcatgatattgtcggccacgttcgtccggccacagaagatgaagtggatcatgcccttgccaccgcctccggtgcagcggagatctggttcgccaccccggcacaggaacgggcagacatccttatccgcgccgcacagctgatggaagatcagttgcagccgctgctcgggatcctggtgcgggaagccggtaagacctttaccaacgcgattgccgaagtccgtgaagccgttgattttctcaattattacgcctctcaggtgaaaactcactttgccggtgatacgcaccgtccgctgggaccggtggtctgtatcagcccgtggaacttcccgctggcaattttcaccggtcaggtagccgctgccctcgccgccggaaacccggtgctggcaaaaccggcggaacagactccgctggtggcagctgttgccgtttcactgctccatgacgccggtgttccgcgtgaagtgctgcaactgctgccgggtgacggcgaaacagtcggtaaccagctggtgtgtgatccgcgtgttcagggcgtgatgtttaccggctccaccgcggtcgcgaagattttacagcgcaatctggccgnccgtctcagtactgaaggccgggtgatcccgctgatcgccgaaaccggtggcctgaatgcgatggtcgtggattcctccgccctgacagaacaggtggtcaccgatgtggtcagttccgcctttgacagtgcgggtcaacgctgttcagcgctgcgtctgctctgcatccaggaggatgtggctgatcgcaccatagagatgctgaaaggcgcgatggcggaatgccgtctcggcaacccggacatactggcaaccgatatcggcccggtgattgatgaagaggcacataacggcatccgccagcatattcagcagatgcgcggtaaaggcagaccggtgtatcagtccgccttcggaatggaaaccggttcaccggcgattcttaacggcacctttatcccgccgacgctgattgaactggatgatgtttctgaactgacgcgggaaattttcggtccggtgctgcatgtggtccgttaccagcgcgataccctgccggaactgacggagaaaattaatgccgccggttacgggctgacattcggtatccatacccgtatcgatgaaactatcgcacaactgacgcagcagattgaagccgggaatatttatgttaaccgcaacattgtcggtgcagtggtcggtgttcagccgttcggcggcgaagggctttccggtaccggtccgaaggcaggcggcccgctctatctccaccgcctgctggcggaacagcctgatgattcagtggtcagccttctggcagaacaggatgatctcaatccgccggatgtcactctgcggacacagttactggcaccgtttgatactttcctcacctggctggaggcgcagcgccgccacgatgtgctgacagcggttatccgttacggcgagttatcacaggccggtacctgccgtctgctgccgggaccgaccggggagcgcaacagttattatctgctgccgcgcggaaccattctcggcctgaatgattcggagcaggatgctctgctgcaactgggtgccacactggcagcgggctgccgtcagctctggcctgcggcggaacatacccgttcactgtataacgctttgccggacaacgtccgtgcgcaaatcacactgacagaagagtggtcagcggatggtgtgatctttaacggtgtgattttccacggtgacagtgatcgcctgcaggcagtaaaccgggatgtggctgcacgcggtggtgagattgtgccggttgccgggctcagtcacggtgatacacaaatcccgctgatgctgttactgcatgagcgtgcggttagtgtgaataccgctgcggcgggcggaaacgccagtctgatgactatcggctga

SEQ ID NO: 6830 - protein, 1324 aa, Morganella morganii
  misc_feature (871)..(871): Xaa can be any naturally occurring amino acid
MVSTTMGVRLDDETRERIKAAAQKIDRTPHWLIRQAIFDYLTQLDSLPDGTLPAAGAPSAQEDETVPAEPPVSCQPFLEFAGDILPQSVTRAAITSAYRIPEPEAVAMLLPQAQLSPDAAQATHKLAYGLAEKLRNQKNSSGRAGLVQGLLQEFSLSSQEGIALMCLAEALLRIPDKATRDVLIRDKISHGDWNSHLGQSKSMFVNAATWGLLFTGKLVATHNEAGLSRSLNRILGKSGEPLVRKGVDMAMRLMGEQFVTGETIARALANARKNEAKGFRYSYDMLGEAALTAADAQAYLVSYQQAIHAIGKASAGRGIYEGPGISIKLSALHPRYSRAQYDRVMSELYPILRDLVVMARQYDIGINIDAEEADRLEISLDLLEKLCFDPQLAGWNGIGFVIQAYQKRCPVVVDYLIDLASRSQRRLMIRLVKGAYWDSEVKRAQVDGLEGYPVYTRKVYTDISYLACARKLLSVPNLIYPQFATHNAHTLSAIYQLAGNNYYPGQYEFQCLHGMGEPLYEQVVGKVADGKLNRPCRVYAPVGTHETLLAYLVRRLLENGANTSFVNRIADGTIPLEMLVEDPVAAVQAMAAKEGAVGLPHPKIPLPRNLYGNTRVNAAGLDLSNEHRLASLSSALLSHAGDNLLSEPLTGGTFTPSAPAEPQPVRNPANHHDIVGHVRPATEDEVDHALATASGAAEIWFATPAQERADILIRAAQLMEDQLQPLLGILVREAGKTFTNAIAEVREAVDFLNYYASQVKTHFAGDTHRPLGPVVCISPWNFPLAIFTGQVAAALAAGNPVLAKPAEQTPLVAAVAVSLLHDAGVPREVLQLLPGDGETVGNQLVCDPRVQGVMFTGSTAVAKILQRNLAXRLSTEGRVIPLIAETGGLNAMVVDSSALTEQVVTDVVSSAFDSAGQRCSALRLLCIQEDVADRTIEMLKGAMAECRLGNPDILATDIGPVIDEEAHNGIRQHIQQMRGKGRPVYQSAFGMETGSPAILNGTFIPPTLIELDDVSELTREIFGPVLHVVRYQRDTLPELTEKINAAGYGLTFGIHTRIDETIAQLTQQIEAGNIYVNRNIVGAVVGVQPFGGEGLSGTGPKAGGPLYLHRLLAEQPDDSVVSLLAEQDDLNPPDVTLRTQLLAPFDTFLTWLEAQRRHDVLTAVIRYGELSQAGTCRLLPGPTGERNSYYLLPRGTILGLNDSEQDALLQLGATLAAGCRQLWPAAEHTRSLYNALPDNVRAQITLTEEWSADGVIFNGVIFHGDSDRLQAVNRDVAARGGEIVPVAGLSHGDTQIPLMLLLHERAVSVNTAAAGGNASLMTIG

SEQ ID NO: 6831 - DNA, 1068 bp, Citrobacter koseri
  misc_feature (455)..(455): n is a, c, g or t
atgacacagaacgttttatttattgaccgcgacggcactctgatcaccgaaccaccggtagatttccaggtggacagattagacaaactggcctttgagccggatgtgatccccgcgcttctgaagctgaaagaggccggataccgctttgtgatggtcaccaaccaggatgggctgggcacagacagtttcccgcaggcggatttcgaggcaccgcaccagctgatgatgcagattttcacctctcagggcattacctttgatgaggtcctgatttgtccgcacaaaccggcggataactgcaactgccgcaaaccgaaaatcacgctggtggaaaaatacctgctgccgggtgtcatcaacatgcaaaacagctatgtgatcggcgatcgtgaaaccgatattcagctcgcggaaaacatggggattaccgggctgcgttacggccagccggncactgactggaacagtatcgcagagcagctgacccgccgtgaccgttacagccgcgtggagcgcaaaaccaaagagaccgatattctcaccgaagtgtggctcgaccgtgaaggcggcagcactatccgtaccggagtcggctttttcgaccacatgctggatcagattgccacccacggcggtttccgcctcaatattcaggtcagcggcgacctggtgattgatgatcaccacaccgtggaagataccggactggcgctgggcgaagccctgaaactggcactcggcgataagcgcggcatcacccgtttcggttttaccctgccgatggatgagtgtcttgcccgctgtgccctggatatctcaggccgtccgcacctggaatacaaagccgattttaaatatcagcgtgtcggcgacctgagcacggagatgattgagcacttcttccgctcgctctcctacaccatgggctgcacgttacacctgaaaaccaaagggaagaacgaccaccacagagccgaaagcctgtttaaagtgttcggacggacactgcgccaggccatccgcgtggaaggtaatgttctgccgagttcaaaaggggtgctgtga

SEQ ID NO: 6832 - protein, 355 aa, Citrobacter koseri
  misc_feature (152)..(152): Xaa can be any naturally occurring amino acid
MTQNVLFIDRDGTLITEPPVDFQVDRLDKLAFEPDVIPALLKLKEAGYRFVMVTNQDGLGTDSFPQADFEAPHQLMMQIFTSQGITFDEVLICPHKPADNCNCRKPKITLVEKYLLPGVINMQNSYVIGDRETDIQLAENMGITGLRYGQPXTDWNSIAEQLTRRDRYSRVERKTKETDILTEVWLDREGGSTIRTGVGFFDHMLDQIATHGGFRLNIQVSGDLVIDDHHTVEDTGLALGEALKLALGDKRGITRFGFTLPMDECLARCALDISGRPHLEYKADFKYQRVGDLSTEMIEHFFRSLSYTMGCTLHLKTKGKNDHHRAESLFKVFGRTLRQAIRVEGNVLPSSKGVL

SEQ ID NO: 6833 - DNA, 1293 bp, Citrobacter koseri
  misc_feature (199)..(199): n is a, c, g or t
atggaactgtacaatttaaaagatgagagtgaaaaagtcagttttgcacaggcggtaaaacaggggctgggacgcggacaggggctgtttttcccgcgtgagattccgttttttgcggcggcggagatggataagctgctggcgatggattttgtcagccgcagcaccaccattctgcatgcactgattggtgatgagntcccggaagctgagctggcagcgcgtgtccgtgccgcctttgccttcccggcaccgctgaacccggtggagccggatgtggcctgtctggagctgtttcacggcccgacactggcgttcaaagatttcggcggacgttttatggcccaggcgctggccgccgttgccggtgacaaaccggtcactattctgaccgcgacttccggggataccggtgctgctgtcgcacacgccttttatggcctgaaaaatgtgcaggtggtgatcctctatccgcagggaaaaatcagtccgttacaggaaaaactgttctgtaccctcggcggcaatattcataccgtagcggtgcaggatgatttcgatgcctgtcaggcactggtaaaacaggcatttgatgatgaggaactgaaacagacgctgcatctgaactcggcaaactccattaatatcagccgtctgctggcacaaatctgttattactttgaagcggtggcacaggttccggcggaaaaacgcggtgagctggtgttctcggtgccgagcggtaacttcggtgacctgactgccggggtgctggcgaaagcgatggggctgccggtgaaacgctttatcgccgcgaccaatgccaacgacactgtgccgcgttatctggcggacggacagtggaaaccggcggcaacagtggcaacgttatccaatgccatggatgtcagccagccgaacaactggccgcgtattgaggcgctgtttgcgcgcgaaggctggccactgaaggagctgcgttccggcgcagtaagtgacgatgaaacccgcgaaaccatgcgcgatctggccgcgaaaggttatatttccgagccgcatgccgcgatcgcgtatcgtctgctgcgcagtgatttgcagccgggcgagtacggtattttcctcggtacggcgcatccggcaaaattcctggagagtgtggaagcgattctgggcagtaaactgccgttaccggctgaactggcggagcgggctgatttgccgttgttgtcagctgtgttaccggcggattttgcggcgctgcgggactatctgctgaagacagtgaagccgtaa

SEQ ID NO: 6834 - protein, 430 aa, Citrobacter koseri
  misc_feature (67)..(67): Xaa can be any naturally occurring amino acid
MELYNLKDESEKVSFAQAVKQGLGRGQGLFFPREIPFFAAAEMDKLLAMDFVSRSTTILHALIGDEXPEAELAARVRAAFAFPAPLNPVEPDVACLELFHGPTLAFKDFGGRFMAQALAAVAGDKPVTILTATSGDTGAAVAHAFYGLKNVQVVILYPQGKISPLQEKLFCTLGGNIHTVAVQDDFDACQALVKQAFDDEELKQTLHLNSANSINISRLLAQICYYFEAVAQVPAEKRGELVFSVPSGNFGDLTAGVLAKAMGLPVKRFIAATNANDTVPRYLADGQWKPAATVATLSNAMDVSQPNNWPRIEALFAREGWPLKELRSGAVSDDETRETMRDLAAKGYISEPHAAIAYRLLRSDLQPGEYGIFLGTAHPAKFLESVEAILGSKLPLPAELAERADLPLLSAVLPADFAALRDYLLKTVKP

SEQ ID NO: 6835 - DNA, 945 bp, Citrobacter koseri
  misc_feature (661)..(661): n is a, c, g or t
atggagctaattcgcggtactcacaatattcgtgcgcgtcaccatggttgcgtgctgactatcggtaattttgatggcgttcatcgcggacatcaggcattactgtcacatctggcgcaggaaggaaaacgcctggggctgccgtcggtcgtcatgatcttcgagccgcagccgctggaattttttgccccggataaagcgccggcacgcctgacccggctgcgcgataaggtaaaatatcttgcgcagtacggtgtggactacttattgtgtgttaaattcagcaaacaatttgcatcactgacaccggatgcttttatctcacacctgctggttgaacagctgggggtgaagtttctggtggtcggggatgattttcgtttcggaaaaaatcgtcagggcgattttaacgggctgtgtgaggcggggaaacagtatggtttcacggtccgcagcacggaaagtttttgtgataacggcaaacggatcagcagtacggccatccgccgcgcgctggaaaacgacgatctggcgcaggctgaggcactgctcgggcacccttaccgcatcagcgggcgtgtggtgcacggcaacgaactcgggcgcaccatcggtttcccgactgccaatatccccctgaaacgtctggccgcaccggtanacggtgtgtacgccgtggacgtatacggcctcgggccgcatccgctgccgggtgtggccaatatcggctcccgcccgacagtacagggtaagagccagcaactggaagttcatctgattgatgtgtctatggatttatacgggcagcatccggatgtagtactgcgcaagaaattgcgaaatgaacagcggtttgcctcgctcgatgagctgaaagcgcaaatcgcgcgggatgagattgcggcaagggaatttttacaatccaacccctcgttatgtgtttaa

SEQ ID NO: 6836 - protein, 314 aa, Citrobacter koseri
  misc_feature (221)..(221): Xaa can be any naturally occurring amino acid
MELIRGTHNIRARHHGCVLTIGNFDGVHRGHQALLSHLAQEGKRLGLPSVVMIFEPQPLEFFAPDKAPARLTRLRDKVKYLAQYGVDYLLCVKFSKQFASLTPDAFISHLLVEQLGVKFLVVGDDFRFGKNRQGDFNGLCEAGKQYGFTVRSTESFCDNGKRISSTAIRRALENDDLAQAEALLGHPYRISGRVVHGNELGRTIGFPTANIPLKRLAAPVXGVYAVDVYGLGPHPLPGVANIGSRPTVQGKSQQLEVHLIDVSMDLYGQHPDVVLRKKLRNEQRFASLDELKAQIARDEIAAREFLQSNPSLCV

SEQ ID NO: 6837 - DNA, 2262 bp, Morganella morganii
  misc_feature (251)..(251): n is a, c, g or t
atgagtgaaataactcatgacggtgtggagcgccaggcgcttcataattttacagagaatgcctacctcaactattccatgtacgtcatcatggacagggcactcccttttatcggcgacgggttaaaaccggttcagcggcgtatcgtgtatgccatgtctgaactggggttaagcaactccgccaaatacaaaaaatccgcccgtactgtcggtgacgtgctgggtaaataccatccgcacggtgacancgcctgttatgaggcgatggtactgatggcgcagccgttctcttaccgctacccgctggtggacggacaggggaactggggggcaccggatgatccgaaatccttcgccgccatgcgttataccgaatcgcgcctgtcaaaatatgcggaagtgctgctcagtgaactggggcacggcaccgcagactgggtgccgaactttgacggcaccatgcaggagccgaaaatgttaccggcgcgtctgccgaacattctgctcaacggcaccaccgggattgcggtcggtatggcgacggatattccgccgcacaatgcccgtgaagtgaccggtgcactgctggcgctgatcgacaagccgtctctgtctctcgaagaggtgatggcgtttatccctggcccggattacccgacagaagcggaaattatcaccggaccggaagatatccgtaagatctataaatccggccgcggctctgtgcgtatgcgcgccgtgtggacaactgaggacggtaatgcggtgatcaccgcgctgccgcatcaggtttccggcgcgaaagtgctggagcagatagctgcacagatgcgggcgaaaaagctgccgatggtggaagatctgcgcgatgaatcggatcatgaaaatccgacccggctggtggttgtgccgcgcagtaaccggatcgatcttgagcaggtgatgactcacctgtttgcgaccacggatctggaaagaagctaccgtatcaacctgaatatgatcggtctggacggacgtccggcggtcaaagggctggttgagatcctcaatgagtggctggtttaccgccgcgaaacggtgcgccgccgcctgaatcaccggctggaaaaagtactgcgccgtctgcatattctcgacggtttgctgctcgcgtatctcaacattgatgaagtgattgaaatcatccgttcggaagatgagccgaaaccggtactgatggatcgtttcgggctgagtgatactcaggcagaagcaatcctcgaactgaaattacgtcatttagccaaactcgaagagatgaaaattcgtggcgagcaggatgaactggccaaagagcgtgataaattacaggctatcctcggctctgagcggcgcatgaacacgctgctgaaaaaagagcttgaggaagacgctaaacagtacggtgacgatcgccgctccccgctcaatgagcgcgaagaggcgaaagccatgagcgagcatgacattctgccatccgaaccggtgacggttgtgctgtcacagatgggctgggtgcgcagcgccaaaggccatgatatcgacccgtccggcatgaactacaaagcgggtgataccttcctcggtgcggcacggggtaaaagtaatcagccggtggtattccttgattccaccggtcgcagttactcgctcgacccgctggaactgccgggtgcccgtggtcagggcgagccgctgaccggcaaactgacaccgccgccgggcgccgtgtttgaacaggtgctgatgaacgatgaaaatcagaagtacctgatggcctcggatgccggttacggctttatctgtacattcagtgacctggtcgcgaaaaacaaagccgggaaagtactgatcacgctgccggataacgcgaaagtcatgacgccgattgaggtgaatgacgaggaaaacgaccttctgctggcagtatcacaggaaggacggatgctgctgttccctgtcggtgacctgccgcagttgtcaaaagggaaggggaacaaaattatctccattacctctgcggcggctgcagccggggaagacggcctggcacatctgtttgttatccgcccggatgccagtgtgacactgcatttcggtaagcgtaaactgatgctgcgtccggaagatctgcagaaattccgtgctgagcgcgggcgccgtggtacggcactgccgcgcggtatgcagaaaaagatcgaacggattgatatttctgaaccagagccgaaggcgtaa

SEQ ID NO: 6838 - protein, 753 aa, Morganella morganii
  misc_feature (84)..(84): Xaa can be any naturally occurring amino acid
MSEITHDGVERQALHNFTENAYLNYSMYVIMDRALPFIGDGLKPVQRRIVYAMSELGLSNSAKYKKSARTVGDVLGKYHPHGDXACYEAMVLMAQPFSYRYPLVDGQGNWGAPDDPKSFAAMRYTESRLSKYAEVLLSELGHGTADWVPNFDGTMQEPKMLPARLPNILLNGTTGIAVGMATDIPPHNAREVTGALLALIDKPSLSLEEVMAFIPGPDYPTEAEIITGPEDIRKIYKSGRGSVRMRAVWTTEDGNAVITALPHQVSGAKVLEQIAAQMRAKKLPMVEDLRDESDHENPTRLVVVPRSNRIDLEQVMTHLFATTDLERSYRINLNMIGLDGRPAVKGLVEILNEWLVYRRETVRRRLNHRLEKVLRRLHILDGLLLAYLNIDEVIEIIRSEDEPKPVLMDRFGLSDTQAEAILELKLRHLAKLEEMKIRGEQDELAKERDKLQAILGSERRMNTLLKKELEEDAKQYGDDRRSPLNEREEAKAMSEHDILPSEPVTVVLSQMGWVRSAKGHDIDPSGMNYKAGDTFLGAARGKSNQPVVFLDSTGRSYSLDPLELPGARGQGEPLTGKLTPPPGAVFEQVLMNDENQKYLMASDAGYGFICTFSDLVAKNKAGKVLITLPDNAKVMTPIEVNDEENDLLLAVSQEGRMLLFPVGDLPQLSKGKGNKIISITSAAAAAGEDGLAHLFVIRPDASVTLHFGKRKLMLRPEDLQKFRAERGRRGTALPRGMQKKIERIDISEPEPKA

SEQ ID NO: 6839 - DNA, 2262 bp, Morganella morganii
  misc_feature (252)..(252): n is a, c, g or t
atgagtgaaataactcatgacggtgtggagcgccaggcgcttcataattttacagagaatgcctacctcaactattccatgtacgtcatcatggacagggcactcccttttatcggcgacgggttaaaaccggttcagcggcgtatcgtgtatgccatgtctgaactggggttaagcaactccgccaaatacaaaaaatccgcccgtactgtcggtgacgtgctgggtaaataccatccgcacggtgacagngcctgttatgaggcgatggtactgatggcgcagccgttctcttaccgctacccgctggtggacggacaggggaactggggggcaccggatgatccgaaatccttcgccgccatgcgttataccgaatcgcgcctgtcaaaatatgcggaagtgctgctcagtgaactggggcacggcaccgcagactgggtgccgaactttgacggcaccatgcaggagccgaaaatgttaccggcgcgtctgccgaacattctgctcaacggcaccaccgggattgcggtcggtatggcgacggatattccgccgcacaatgcccgtgaagtgaccggtgcactgctggcgctgatcgacaagccgtctctgtctctcgaagaggtgatggcgtttatccctggcccggattacccgacagaagcggaaattatcaccggaccggaagatatccgtaagatctataaatccggccgcggctctgtgcgtatgcgcgccgtgtggacaactgaggacggtaatgcggtgatcaccgcgctgccgcatcaggtttccggcgcgaaagtgctggagcagatagctgcacagatgcgggcgaaaaagctgccgatggtggaagatctgcgcgatgaatcggatcatgaaaatccgacccggctggtggttgtgccgcgcagtaaccggatcgatcttgagcaggtgatgactcacctgtttgcgaccacggatctggaaagaagctaccgtatcaacctgaatatgatcggtctggacggacgtccggcggtcaaagggctggttgagatcctcaatgagtggctggtttaccgccgcgaaacggtgcgccgccgcctgaatcaccggctggaaaaagtactgcgccgtctgcatattctcgacggtttgctgctcgcgtatctcaacattgatgaagtgattgaaatcatccgttcggaagatgagccgaaaccggtactgatggatcgtttcgggctgagtgatactcaggcagaagcaatcctcgaactgaaattacgtcatttagccaaactcgaagagatgaaaattcgtggcgagcaggatgaactggccaaagagcgtgataaattacaggctatcctcggctctgagcggcgcatgaacacgctgctgaaaaaagagcttgaggaagacgctaaacagtacggtgacgatcgccgctccccgctcaatgagcgcgaagaggcgaaagccatgagcgagcatgacattctgccatccgaaccggtgacggttgtgctgtcacagatgggctgggtgcgcagcgccaaaggccatgatatcgacccgtccggcatgaactacaaagcgggtgataccttcctcggtgcggcacggggtaaaagtaatcagccggtggtattccttgattccaccggtcgcagttactcgctcgacccgctggaactgccgggtgcccgtggtcagggcgagccgctgaccggcaaactgacaccgccgccgggcgccgtgtttgaacaggtgctgatgaacgatgaaaatcagaagtacctgatggcctcggatgccggttacggctttatctgtacattcagtgacctggtcgcgaaaaacaaagccgggaaagtactgatcacgctgccggataacgcgaaagtcatgacgccgattgaggtgaatgacgaggaaaacgaccttctgctggcagtatcacaggaaggacggatgctgctgttccctgtcggtgacctgccgcagttgtcaaaagggaaggggaacaaaattatctccattacctctgcggcggctgcagccggggaagacggcctggcacatctgtttgttatccgcccggatgccagtgtgacactgcatttcggtaagcgtaaactgatgctgcgtccggaagatctgcagaaattccgtgctgagcgcgggcgccgtggtacggcactgccgcgcggtatgcagaaaaagatcgaacggattgatatttctgaaccagagccgaaggcgtaa

SEQ ID NO: 6840 - protein, 753 aa, Morganella morganii; identical to SEQ ID NO: 6838
  misc_feature (84)..(84): Xaa can be any naturally occurring amino acid

SEQ ID NO: 6841 - DNA, 1050 bp, Citrobacter koseri
  misc_feature (586)..(586): n is a, c, g or t
atgaacccggataacaaaccgcaggcagagcagctccttgattcactgatcaactgtgtcctgctgctggataatgatttgattatccgttacgccaatcaatcggctatgcagttattcgcccagagtgcccgtaaactcaccggcacgccgctccctattttatacagctacctttccctcgataccgccacattgcagaccacactggcagaaggccacagctttactgacaacgatgtgaccctggtggtaaataaccagatgcacgctctttcgctgagtgcccagccggtatccggcgattttattctgctggaactgacaccgctcgacagtcaccggcgcattacccaggaacaattacagcaggcgcagcaggctgccgcccgtgatctggtacgcgggctggcgcatgaaatcaaaaatccgctcggcgggttacgcggtgccgcacagctgttatcccgcgcgctgccggatccggcacttcaggaatacacacaggtgattatcgagcaggccgatcgcctgcgggcgctggttgatcgtcttctcggcccccagcatccggggcagaaaagcntgcagagtattcaccatgtggcggagcgggtttttcagctcatcaatctggaaaaaccggacaatatcacgctggtcaaagactacgatcccagtttgccggagttatcgcattatcccgaccagatcgagcaggttatcctcaatattatgcgcaatgccctggaggccctgcattccgcaggcggcacaattattctgcgtacccgcaccgcattccaggtaatgctgcacggagaacgctaccggctggccgccaggattgatattgaggacaacggcccgggtattccgccgcatatcctggataccctgttctacccgatggtcagcggccgcgaaggcggttccgggctgggtttatccattgcccgcaatcttatcgatcagcataacggcaaaattgagttcagcagctggccgggtcacaccttattttcactttatctgccaatccgtcagtaa

SEQ ID NO: 6842 - protein, 349 aa, Citrobacter koseri
  misc_feature (196)..(196): Xaa can be any naturally occurring amino acid
MNPDNKPQAEQLLDSLINCVLLLDNDLIIRYANQSAMQLFAQSARKLTGTPLPILYSYLSLDTATLQTTLAEGHSFTDNDVTLVVNNQMHALSLSAQPVSGDFILLELTPLDSHRRITQEQLQQAQQAAARDLVRGLAHEIKNPLGGLRGAAQLLSRALPDPALQEYTQVIIEQADRLRALVDRLLGPQHPGQKSXQSIHHVAERVFQLINLEKPDNITLVKDYDPSLPELSHYPDQIEQVILNIMRNALEALHSAGGTIILRTRTAFQVMLHGERYRLAARIDIEDNGPGIPPHILDTLFYPMVSGREGGSGLGLSIARNLIDQHNGKIEFSSWPGHTLFSLYLPIRQ

SEQ ID NO: 6843 - DNA, 1647 bp, Citrobacter koseri
  misc_feature (1399)..(1399): n is a, c, g or t
atgtctgcatatagatggttaattaataccattgaccgcgtcgccatggtggaagaagtcatcaatgagttttcggcctcagaaatcagcatcaattccatggaagtttttccgtgcaaaatttatgtcaaattcaacgcggaatgcgagcgggatgttaagctgttgctgagtaaactcctgcttaatcctgatgttatcagtgtcacccgttccaaattacagccctacgaacgtaaagaaaaagaattacaggcgattctggaatccaccacggacggcattatcggtatcaataatcagggtaatatcaactacttcaataaagtggcggaagattttttctcgatctctcgggaaaatattgtcggcgttaatatcagcaaaattctcagcggcaaaaaccaggcggtgctcaccaaactgctcggcggtaacagtttcgatcactatcagatggttaccagtacgccgaaaggggagttgtactatatctgctccggccgtccgattctgagtgaagagtcccaggtgatgggggcggttatcaccttcaaaagcctgcgctcggtgcagcaaatggcgtcttcggtgaataaaagcctgccgttcagctttgatgacattatctgtgaaagcgaaatcatgatgaacctgattgatttcgctaaaaaaatctcaataagcccgtatacggtactgatccgcggtgaaaccggtaccggtaaagagctgtttgcccgcgccattcataacgccagtgaccgcagcgctcacccgtttgcgccgattaactgtgcggcactgccggaaaacctgattgaaagtgagctgttcggttatgagggcggggcattcagcggcgccagcaagggcgggaagatggggctgtttgaatcagccaaccacggcaccgtgtttctggatgaattcggcgagctttcccttatcctgcaaagtaaattactgcgggtattacaggaaggcgtgatccgccgggtcggcgggcacaaggagatcccggtggatgtacggatcattgtcgccaccaaccggaatctggaagagatgatcgagaacaaatcgttccgtgaagatctctattaccggatcaacgtgatcccgattaatatcccgccgctgaaagagcggaaaacagatatcccgctgttattacagcgctttatcagcaaatacacgacagagctgaataaacagctcagtttgtctcaggatgcatatcaccagttaatggcctattcctggccgggtaacgtgcgggaactgcaaaacgtgattctgcgggccattcatctggcttccggacgggaaattaccgtcggggatctgtggctgccccatgaggaagtgatggcctctccggcactccggccgaagncggcaccgaaaacggaaataccccctgcggtattgccggtgcaggaagacattaacctgaaagaaactcttgcacggcaggaaaaaagcctgctggaagattatctgcgccgctatggttcggcccgtaaagtatcccgcgaaatcgggatgtctcacaccaccgtactgaataaagcccgttattataatctggagcatctgctgacctacagcacagtacgccggtcagcagacaaaacagattaa

SEQ ID NO: 6844 - protein, 548 aa, Citrobacter koseri
  misc_feature (467)..(467): Xaa can be any naturally occurring amino acid
MSAYRWLINTIDRVAMVEEVINEFSASEISINSMEVFPCKIYVKFNAECERDVKLLLSKLLLNPDVISVTRSKLQPYERKEKELQAILESTTDGIIGINNQGNINYFNKVAEDFFSISRENIVGVNISKILSGKNQAVLTKLLGGNSFDHYQMVTSTPKGELYYICSGRPILSEESQVMGAVITFKSLRSVQQMASSVNKSLPFSFDDIICESEIMMNLIDFAKKISISPYTVLIRGETGTGKELFARAIHNASDRSAHPFAPINCAALPENLIESELFGYEGGAFSGASKGGKMGLFESANHGTVFLDEFGELSLILQSKLLRVLQEGVIRRVGGHKEIPVDVRIIVATNRNLEEMIENKSFREDLYYRINVIPINIPPLKERKTDIPLLLQRFISKYTTELNKQLSLSQDAYHQLMAYSWPGNVRELQNVILRAIHLASGREITVGDLWLPHEEVMASPALRPKXAPKTEIPPAVLPVQEDINLKETLARQEKSLLEDYLRRYGSARKVSREIGMSHTTVLNKARYYNLEHLLTYSTVRRSADKTD

SEQ ID NO: 6845 - DNA, 1890 bp, Morganella morganii
  misc_feature (331)..(331): n is a, c, g or t
atgttttatccggatcattttgacgtcattgttatcggcggtggccacgccggtactgaagctgcaatggcagcggcacgtatgggccgtcaaacacttttactgactcacaatatcgacactctgggtcagatgtcctgcaaccctgctatcggtgggatcggtaagggacatctggttaaagagatcgatgcactcggcggactgatggcacatgccactgaccgtgccggtattcagttcagaaccctgaatgccagcaaaggaccggcagttcatgccacccgtgctcaggctgaccgcgtgctttaccgtctggcagtgcgcacancactggaaaaccagcctaacctgatgattttccagcagccggtagaagatcttatcgttgaaaacgataccgttaccggtgcagtgacccagatgggactgaaattcagagccaaatcggttgtactgactgtcgggacattcctggacggaaaaattcatatcgggctggaaaactacagcggcggccgtgccggtgatccgccgtccgtctcactgtcacaccgtctgcgggaactgccgctgcgtgtcggccgcctgaaaacagggacaccgccgcgtattgacgcccggaccatcgattttgctcagctgacaccacaattcggtgacaacccgatgccggtattctccttcatggggagtgcggatgagcatcctgaacagatgccgtgccatatcacgtacaccaatgaaaaaacccatgaggtgatccgtaataacctcgatcgcagcccgatgtacgccggtgtgatcgaagggatcggtccgcgttactgcccgtccattgaagacaaagtgatgcgctttgcggatcgtaaccagcatcagatcttcctggagccggaagggctgaccagcaatgaaatttacccgaacggtatctccaccagcttaccgtttgatgtgcagatgcagattgttcactcgatgaaaggcatggaaaacgcgcgtattgtgcgtcccggttatgctatcgagtatgatttctttgacccgcgcgacctgaaacagaccctggaaagcaaatatctgcacggcctgttctttgccggacaaatcaacggcaccaccggttacgaagaagcggccgctcaggggctgctggccggtctgaacgccgcccgctattctgccgatcaggaaggctggttcccgcgccgtgatcaggcgtatatcggcgtgctggtggacgacctgtgcacactcggtaccaaagaaccgtaccggatgtttacctcacgggctgaataccgtctgatgctgcgtgaagacaacgcagatgcccgtctgacagaaaccggccgcaaactggggctggtggatgacgcgcgctgggcacacttcagtgaaaaaatggagctgatagagaaagaacgtcagcgcctgagagatatccgcgtacacccgcagtccgaaagcgtgaaagagatcaacgcgatcctgaacacgcctctctccaaagaagcgaccggggaagatcttctgcgccgtccggaaatggactacaaccgtctgatgaccctgagtgattttgcaccgggggttgattcaccggctgcggcacagcaggtggaaatccaggtgaaatacgaaggctatatctcccgtcagcaggacgaaattcagcgccagctgcgtaatgagaacgcgacactgcctgttgatctcgattacaaacaggtgagcgggctttccaacgaagtggtggcaaaactcaacgaccacaaaccgacttcgatcggacaggcatcgcggatctccggtatcacaccggctgctatctctatcctgctggtttggctgaaaaagcagggccttctgcggcggagtgcgtaa

SEQ ID NO: 6846 - protein, 629 aa, Morganella morganii
  misc_feature (111)..(111): Xaa can be any naturally occurring amino acid
MFYPDHFDVIVIGGGHAGTEAAMAAARMGRQTLLLTHNIDTLGQMSCNPAIGGIGKGHLVKEIDALGGLMAHATDRAGIQFRTLNASKGPAVHATRAQADRVLYRLAVRTXLENQPNLMIFQQPVEDLIVENDTVTGAVTQMGLKFRAKSVVLTVGTFLDGKIHIGLENYSGGRAGDPPSVSLSHRLRELPLRVGRLKTGTPPRIDARTIDFAQLTPQFGDNPMPVFSFMGSADEHPEQMPCHITYTNEKTHEVIRNNLDRSPMYAGVIEGIGPRYCPSIEDKVMRFADRNQHQIFLEPEGLTSNEIYPNGISTSLPFDVQMQIVHSMKGMENARIVRPGYAIEYDFFDPRDLKQTLESKYLHGLFFAGQINGTTGYEEAAAQGLLAGLNAARYSADQEGWFPRRDQAYIGVLVDDLCTLGTKEPYRMFTSRAEYRLMLREDNADARLTETGRKLGLVDDARWAHFSEKMELIEKERQRLRDIRVHPQSESVKEINAILNTPLSKEATGEDLLRRPEMDYNRLMTLSDFAPGVDSPAAAQQVEIQVKYEGYISRQQDEIQRQLRNENATLPVDLDYKQVSGLSNEVVAKLNDHKPTSIGQASRISGITPAAISILLVWLKKQGLLRRSA

SEQ ID NO: 6847 - DNA, 2415 bp, Morganella morganii
  misc_feature (1398)..(1398): n is a, c, g or t
atgtcgaatacctatgactcctcaagtatcaaagtattaaaagggctggacgcggtgcgtaaacgcccgggaatgtacattggtgataccgatgacggaaccggtttacaccacatggtcttcgaggttgttgacaacgctatcgacgaagccctcgccggttactgtaaagacatcattgtgaccattcacaatgataattcagtctccgtacaggatgacggccgcggtatcccgaccgggatccatgaagaagaaggcgtctccgccgcagaagttatcatgactgttctgcacgccggcgggaagttcgatgataactcctataaagtctcaggcggcctgcacggcgtcggggtctctgttgttaacgccctgtctgaaaaactggaactggttatccgccgtgacggcaaagttcacgagcagatctaccgccacggtgaacctcaggatcgcctgactgttgtcggcgaaaccgataaaaccgggacacgcgtgcgtttctggccgagcatggacaccttcaaaggcgagactgaattccagtacgacattctggcaaaacgcctgcgcgaactctccttcctgaactccggtgtatcgatccgtctgatcgataaacgcgacggcaaagaagatcactttcactacgaaggcggtatcaaagcattcgtggaatatttaagccgcgccaaaacctcgatccataacaacgttttctatttctccaccgagaaagacgatatcggcgtggaagtctccatgcagtggaatgactccttccaggaaaacgtatactgcttcactaacaatattccgcagcgcgacggtggtgctcatctcgccggtttccgcgccgccatgacccgtaccctcaacagctatattgagaaagaagggctgaataaaaaatccaaagtcagcaccaccggggatgatgcccgtgaagggctggtagcggtcatttccgtcaaagtgccggatccgaaattctcctctcagaccaaagacaagctggtctcttccgaagtgaaaacggcggttgaaaccctgatgaacgaaaagctgtctgaatatctggatgagaacccgaacgacaccaaaatcattgtcggcaaaattattgatgccgcacgtgcccgtgaagccgcacgccgcgcccgtgaaatgacacgccgtaaaggcgcgctggatttagccggtctgccgggtaaactggcggactgccaggaacgcgacccggccttctccgaactgtacttagtggaaggggactctgcgggcggctctgcaaaacaggggcgtaaccgcaagaaccaggcaattttaccgctgaaaggtaaaatcctgaacgttgagaaggcgcgttttgataaaatgctggcttctcaggangttgccacgctgatcaccgcgctcggctgcggtatcggccgcgacgaatacaacccggacaaactgcgctatcacagcatcatcatcatgaccgatgccgacgtcgatggttcgcacatccgtaccctgttactgaccttcttctaccgtcagatgccggaaatcattgagcgcggttatgtgtatatcgcacagccgccgctgtataaagtgaaaaaaggcaagcaggaacagtatattaaagatgacgaagcgatggagcagtatcaggtctctatcgcactggatggcgcggcactgtatgtaaacgaaaatgcagcaccgattcagggcgaacatctggaaaaactgctgcacgaatacaacggcgcacacaaaattatccgccgtttagagcgtctctatccgctggcactgttaaacagcctggtctaccagccgaaactggaagaatccgcgctgctgaacaaaaccgaggtagaagcctgggcacagagcctgacagaacgcctgacccgtcatgaagagcacggcagcacctacagctaccgtattgcggaaaacaaagagcgccagctgtttgagccggtactgactatccgtacccacggtgttgatactgactacaatctggatttcgattttgttcacggcagcgaatatgcccgtatctccaaactgggtgagcttatccgtggtctgattgaagaaggtgcttatgttgtccgtggtgagcgccgtcagaacgtcagcaacttcgaacaggcccttgactggctgatgaaagaatcacgccgtggtctggctgtacagcgctataaagggctgggtgaaatgaacccggaacagctgtgggaaaccaccatgaacccggaaacccgccgtatgttgcaggtcacggtaaaagatgcgattgcaacggatcagttattcaccacactgatgggtgatgatgttgaaccgcgccgagcctttatcgaagagaatgccctgaaagcagcaaacatcgacgtataa

SEQ ID NO: 6848 - protein, 804 aa, Morganella morganii
  misc_feature (466)..(466): Xaa can be any naturally occurring amino acid
MSNTYDSSSIKVLKGLDAVRKRPGMYIGDTDDGTGLHHMVFEVVDNAIDEALAGYCKDIIVTIHNDNSVSVQDDGRGIPTGIHEEEGVSAAEVIMTVLHAGGKFDDNSYKVSGGLHGVGVSVVNALSEKLELVIRRDGKVHEQIYRHGEPQDRLTVVGETDKTGTRVRFWPSMDTFKGETEFQYDILAKRLRELSFLNSGVSIRLIDKRDGKEDHFHYEGGIKAFVEYLSRAKTSIHNNVFYFSTEKDDIGVEVSMQWNDSFQENVYCFTNNIPQRDGGAHLAGFRAAMTRTLNSYIEKEGLNKKSKVSTTGDDAREGLVAVISVKVPDPKFSSQTKDKLVSSEVKTAVETLMNEKLSEYLDENPNDTKIIVGKIIDAARAREAARRAREMTRRKGALDLAGLPGKLADCQERDPAFSELYLVEGDSAGGSAKQGRNRKNQAILPLKGKILNVEKARFDKMLASQXVATLITALGCGIGRDEYNPDKLRYHSIIIMTDADVDGSHIRTLLLTFFYRQMPEIIERGYVYIAQPPLYKVKKGKQEQYIKDDEAMEQYQVSIALDGAALYVNENAAPIQGEHLEKLLHEYNGAHKIIRRLERLYPLALLNSLVYQPKLEESALLNKTEVEAWAQSLTERLTRHEEHGSTYSYRIAENKERQLFEPVLTIRTHGVDTDYNLDFDFVHGSEYARISKLGELIRGLIEEGAYVVRGERRQNVSNFEQALDWLMKESRRGLAVQRYKGLGEMNPEQLWETTMNPETRRMLQVTVKDAIATDQLFTTLMGDDVEPRRAFIEENALKAANIDV

SEQ ID NO: 6849 - DNA, 2415 bp, Morganella morganii
  misc_feature (1391)..(1391): n is a, c, g or t
atgtcgaatacctatgactcctcaagtatcaaagtattaaaagggctggacgcggtgcgtaaacgcccgggaatgtacattggtgataccgatgacggaaccggtttacaccacatggtcttcgaggttgttgacaacgctatcgacgaagccctcgccggttactgtaaagacatcattgtgaccattcacaatgataattcagtctccgtacaggatgacggccgcggtatcccgaccgggatccatgaagaagaaggcgtctccgccgcagaagttatcatgactgttctgcacgccggcgggaagttcgatgataactcctataaagtctcaggcggcctgcacggcgtcggggtctctgttgttaacgccctgtctgaaaaactggaactggttatccgccgtgacggcaaagttcacgagcagatctaccgccacggtgaacctcaggatcgcctgactgttgtcggcgaaaccgataaaaccgggacacgcgtgcgtttctggccgagcatggacaccttcaaaggcgagactgaattccagtacgacattctggcaaaacgcctgcgcgaactctccttcctgaactccggtgtatcgatccgtctgatcgataaacgcgacggcaaagaagatcactttcactacgaaggcggtatcaaagcattcgtggaatatttaagccgcgccaaaacctcgatccataacaacgttttctatttctccaccgagaaagacgatatcggcgtggaagtctccatgcagtggaatgactccttccaggaaaacgtatactgcttcactaacaatattccgcagcgcgacggtggtgctcatctcgccggtttccgcgccgccatgacccgtaccctcaacagctatattgagaaagaagggctgaataaaaaatccaaagtcagcaccaccggggatgatgcccgtgaagggctggtagcggtcatttccgtcaaagtgccggatccgaaattctcctctcagaccaaagacaagctggtctcttccgaagtgaaaacggcggttgaaaccctgatgaacgaaaagctgtctgaatatctggatgagaacccgaacgacaccaaaatcattgtcggcaaaattattgatgccgcacgtgcccgtgaagccgcacgccgcgcccgtgaaatgacacgccgtaaaggcgcgctggatttagccggtctgccgggtaaactggcggactgccaggaacgcgacccggccttctccgaactgtacttagtggaaggggactctgcgggcggctctgcaaaacaggggcgtaaccgcaagaaccaggcaattttaccgctgaaaggtaaaatcctgaacgttgagaaggcgcgttttgataaaatgctggcttntcaggaagttgccacgctgatcaccgcgctcggctgcggtatcggccgcgacgaatacaacccggacaaactgcgctatcacagcatcatcatcatgaccgatgccgacgtcgatggttcgcacatccgtaccctgttactgaccttcttctaccgtcagatgccggaaatcattgagcgcggttatgtgtatatcgcacagccgccgctgtataaagtgaaaaaaggcaagcaggaacagtatattaaagatgacgaagcgatggagcagtatcaggtctctatcgcactggatggcgcggcactgtatgtaaacgaaaatgcagcaccgattcagggcgaacatctggaaaaactgctgcacgaatacaacggcgcacacaaaattatccgccgtttagagcgtctctatccgctggcactgttaaacagcctggtctaccagccgaaactggaagaatccgcgctgctgaacaaaaccgaggtagaagcctgggcacagagcctgacagaacgcctgacccgtcatgaagagcacggcagcacctacagctaccgtattgcggaaaacaaagagcgccagctgtttgagccggtactgactatccgtacccacggtgttgatactgactacaatctggatttcgattttgttcacggcagcgaatatgcccgtatctccaaactgggtgagcttatccgtggtctgattgaagaaggtgcttatgttgtccgtggtgagcgccgtcagaacgtcagcaacttcgaacaggcccttgactggctgatgaaagaatcacgccgtggtctggctgtacagcgctataaagggctgggtgaaatgaacccggaacagctgtgggaaaccaccatgaacccggaaacccgccgtatgttgcaggtcacggtaaaagatgcgattgcaacggatcagttattcaccacactgatgggtgatgatgttgaaccgcgccgagcctttatcgaagagaatgccctgaaagcagcaaacatcgacgtataa

SEQ ID NO: 6850 - protein, 804 aa, Morganella morganii
  misc_feature (464)..(464): Xaa can be any naturally occurring amino acid
MSNTYDSSSIKVLKGLDAVRKRPGMYIGDTDDGTGLHHMVFEVVDNAIDEALAGYCKDIIVTIHNDNSVSVQDDGRGIPTGIHEEEGVSAAEVIMTVLHAGGKFDDNSYKVSGGLHGVGVSVVNALSEKLELVIRRDGKVHEQIYRHGEPQDRLTVVGETDKTGTRVRFWPSMDTFKGETEFQYDILAKRLRELSFLNSGVSIRLIDKRDGKEDHFHYEGGIKAFVEYLSRAKTSIHNNVFYFSTEKDDIGVEVSMQWNDSFQENVYCFTNNIPQRDGGAHLAGFRAAMTRTLNSYIEKEGLNKKSKVSTTGDDAREGLVAVISVKVPDPKFSSQTKDKLVSSEVKTAVETLMNEKLSEYLDENPNDTKIIVGKIIDAARAREAARRAREMTRRKGALDLAGLPGKLADCQERDPAFSELYLVEGDSAGGSAKQGRNRKNQAILPLKGKILNVEKARFDKMLAXQEVATLITALGCGIGRDEYNPDKLRYHSIIIMTDADVDGSHIRTLLLTFFYRQMPEIIERGYVYIAQPPLYKVKKGKQEQYIKDDEAMEQYQVSIALDGAALYVNENAAPIQGEHLEKLLHEYNGAHKIIRRLERLYPLALLNSLVYQPKLEESALLNKTEVEAWAQSLTERLTRHEEHGSTYSYRIAENKERQLFEPVLTIRTHGVDTDYNLDFDFVHGSEYARISKLGELIRGLIEEGAYVVRGERRQNVSNFEQALDWLMKESRRGLAVQRYKGLGEMNPEQLWETTMNPETRRMLQVTVKDAIATDQLFTTLMGDDVEPRRAFIEENALKAANIDV

SEQ ID NO: 6851 - DNA, 780 bp, Morganella morganii
  misc_feature (268)..(268): n is a, c, g or t
atgacagataaaaaacgtctctccgttgtgatgatcagtaaaaacaatgccgatgttatcggtgattgcctgaactccgttcaggggctggcggatgaaatcattgtgctcgattccggtagtcaggacgacacactgaccatcgcccgtaatgccggagctcaggtatatgaaaaccgggagtggccgggcttcggccgccagcggcagattgcccagcagtatgccaccggggattatatcctgatgctcgataccgacgagcggnttacgccggagctgaaacaatccgttgaacaggtacttaccgcgccgcagaaaaatacagtgtatcgttttgcccgccgcaatctgtttctcgggcgttttatgaagcacagcggctggtatccggatcatgtcctgcggttatatccgcgtgagcaatatcagtacaacagtaatgcagttcatgaatctctggagactcagggggccaatgtcatcacactgaaaggggatgtcttgcacctgacctgccgcgatttaccagagtttcagcaaaagcagctgcgctatgccgctgactgggcaaaagcccgtcatctggccggtaaacgctgctctttcctctctgtactgactcacaccgccggtgcgttctgtaaaacctggctgctgagagccggattcctggatggcagacaggggcttatccttgcatttgtgaacgcacaatatacctttaataaatacgccactctgtggtccgtcagtaacaacgatgagtcagcatcatga

SEQ ID NO: 6852 - protein, 259 aa, Morganella morganii
  misc_feature (90)..(90): Xaa can be any naturally occurring amino acid
MTDKKRLSVVMISKNNADVIGDCLNSVQGLADEIIVLDSGSQDDTLTIARNAGAQVYENREWPGFGRQRQIAQQYATGDYILMLDTDERXTPELKQSVEQVLTAPQKNTVYRFARRNLFLGRFMKHSGWYPDHVLRLYPREQYQYNSNAVHESLETQGANVITLKGDVLHLTCRDLPEFQQKQLRYAADWAKARHLAGKRCSFLSVLTHTAGAFCKTWLLRAGFLDGRQGLILAFVNAQYTFNKYATLWSVSNNDESAS

SEQ ID NO: 6853 - DNA, 2163 bp, Citrobacter koseri
  misc_feature (1296)..(1296): n is a, c, g or t
atggacgtctcttatctgcttgaaagccttaatgataaacagcgcgaagcggtggcggctccccgctcaaacatgctggtgctggcgggtgccggttccggaaaaacccgggtgctggtgcaccgtatcgcctggctgctggcagtggagaatgcttctccgttttcggtgatgtcagtgacatttaccaacaaagcggcggcggaaatgcgccaccgtattgaagagctggtcggcaccagtgagggcgggatgtggatcgggacgttccacggcctggcacaccgtctgttgcgggcgcatcaccttgatgccggattaccgcaggattttcagatcctcgacagtgaagatcagatccgcctgatccgccgcctgatcaaagccatgaatctcgatgaaaaacaatggccggccaaacagggctgctggtatatcaacggcaaaaaagatgaaggattgcggcctcagcatgttgagagctacggcaacccggtggaagccacctggctgcggatctatcaggcgtatcaggaagcctgcgaccgtgcggggctggtggattttgccgaactgctgctgcgcgcacatgaactgtggcttaataaaccggcgattttacagcactaccgcgaccgttttaccaatatcctcgtggacgaattccaggacaccaacagcatccagtatgcctgggtacgcatgctggcgggcgataccggtaaagtgatgattgtcggtgatgatgatcagtctatctacggctggcgcggggcgcaggtggaaaatatccagcgcttcctgaaagactttccgggcgctgtcaccatccgcctcgagcaaaactaccgttccaccaacaatattctgaaggcggcgaacgccctgatctcccacaacagcgaccggctggggaaaaacctctggacggacggcgaggacggcgagcctatctctctgtattgtgcctttaatgatctggatgaggcgcgttatgtggtcggacgcatcaagcagtggcatgagaacggcggggcgctggcagactgcgcgattctctaccgcagcaacgcccagtcccgtttacaggaagaagcactgttacaggccgcgctgccgtaccgtatttacggcggccagcgcttcttcgagcgccaggaaatcaaagatgcgctggcgtatctgcgcctgatttcaaaccgtcatgatgacgcggcgtttgagcgtgtggtaaacaccccgacccgcgggatcggcgaccgcaccctggacgtggtgcgtcagacggcccgtgancgggaactgaccctctgggaaagctgcggtgtgctgctggaagaaaaagcactggcgggacgtgctgcctccgcgctgggacgtttcctcgaactgatcaatctgctggcgcaggaaactgacggcctgccgctgcatgtgcagactgaccgcgtgatccgcgattccggactgcgggcacactatgagcaggaaaaaggtgaaaaagcccaggcgcggatcgaaaacttagaagaactggtgaccgcaaccaaccagttcagctatcaggatgctgacgaagggctgacgccgttacaggcatttctgtcccatgccgcgctggaatccggcgaaggtcaggcggaccgctatcaggatgctgtccagctgatgacactgcactccgccaaagggctggagttcccgcaggtctttatcgtcggggtggaagagggcatgttcccgggcatgatgtcggtggaggagagcggccgtctcgaagaggagcggaggctggcctatgtcggtgtgacccgtgccatgcagaagctgactctgacctatgccgagacccgccgtctgtacggcaaagaggtgtatcaccggccatcccgttttatcggtgaactgccgccggagtgtgtggaggaagtgcgcctgcgtgctaccgtatcccgcccggttaatcatcagcggctgggtacaccgatcaccgccaatgacagcggttataccctcgggcagcgtgtccgtcatccgaaattcggcgagggcactatcatcaatatggaaggtaacggcgagcatacccgcttacagatagccttccagggtgaagggatcaaatggctggtggcctcctacgccaaactggaaaaaccctga

SEQ ID NO: 6854 - protein, 720 aa, Citrobacter koseri
  misc_feature (432)..(432): Xaa can be any naturally occurring amino acid
MDVSYLLESLNDKQREAVAAPRSNMLVLAGAGSGKTRVLVHRIAWLLAVENASPFSVMSVTFTNKAAAEMRHRIEELVGTSEGGMWIGTFHGLAHRLLRAHHLDAGLPQDFQILDSEDQIRLIRRLIKAMNLDEKQWPAKQGCWYINGKKDEGLRPQHVESYGNPVEATWLRIYQAYQEACDRAGLVDFAELLLRAHELWLNKPAILQHYRDRFTNILVDEFQDTNSIQYAWVRMLAGDTGKVMIVGDDDQSIYGWRGAQVENIQRFLKDFPGAVTIRLEQNYRSTNNILKAANALISHNSDRLGKNLWTDGEDGEPISLYCAFNDLDEARYVVGRIKQWHENGGALADCAILYRSNAQSRLQEEALLQAALPYRIYGGQRFFERQEIKDALAYLRLISNRHDDAAFERVVNTPTRGIGDRTLDVVRQTARXRELTLWESCGVLLEEKALAGRAASALGRFLELINLLAQETDGLPLHVQTDRVIRDSGLRAHYEQEKGEKAQARIENLEELVTATNQFSYQDADEGLTPLQAFLSHAALESGEGQADRYQDAVQLMTLHSAKGLEFPQVFIVGVEEGMFPGMMSVEESGRLEEERRLAYVGVTRAMQKLTLTYAETRRLYGKEVYHRPSRFIGELPPECVEEVRLRATVSRPVNHQRLGTPITANDSGYTLGQRVRHPKFGEGTIINMEGNGEHTRLQIAFQGEGIKWLVASYAKLEKP

SEQ ID NO: 6855 - DNA, 1212 bp, Morganella morganii
  misc_feature (566)..(566): n is a, c, g or t
atgaaaaccttttctcccgatacattccgccgcgcctttcccgggactgccggtgacactgtttttctcgacagcgccgccaccgcccttaaaccggaggtgatgacacaggccaccgcccgctattatcagcatgacagcggtgcgaccgttcaccgcagccatcaccggcaggccagagccgtcactgaacagtttgagcaggcgcgtgacgctgtgcggcagctgattcaggctgaagatgcccgcagctgtatctggacaaaaggcaccaccgaatccctgaacctggtcgctcagggctttttccgcccgcgtctgcagccgggggatgaaatcattgtcagtgagctggaacaccactccaacctgatcccgtggatcatgctggcacagcagaccggggcaaccctggtgaaatggccgctgacagcggacagaacactgtgctgtgatcagctggaaaccctgctgtcaccgcgcaccaggctggtggcggtcacacagatgtccaatgtcaccggctatcagccggatattgcccgcgcggcacagctggcacatcngcacggcgcactgattatcgctgacggtgctcagggcgtggttcaccggccgctgaatgtcaccctcagtaatgttgatttctatgcgttttccgcccacaaactctatggcccgaacggactgggtgtgctgtacggccgtccggaactgctcagtgatatgcagccgtggcagggcggcggcaaaatgctgacggataccgactttttcagctttaccccggcaccggttcccgcccgttttgaagcaggaacaccgaatgtggccggtgttactgcgttcggggaaaccctgcgctggctggatacaatcgatctcaccgccgcccacgattacaccattgcactgtgtgacagtgcggagcagcaactcgcggcacttcccggtttccgcagttaccgcagcccgggcagcccgctgctggcctttaatatcgatggtattcatcacagtgatatcgccacgctgctgtcggaaaaaaatatcgccctgcgccacgggcagcactgtgcacagccgctgtgtcaggcgctgggaacggaaggctgtctgcgggtctcctttatgccgtataatcagccggatgatgtccgtcagctggtgcaggcggtacaatttgctcttgaaattctggctgacgactga

SEQ ID NO: 6856 - protein, 403 aa, Morganella morganii
  misc_feature (189)..(189): Xaa can be any naturally occurring amino acid
MKTFSPDTFRRAFPGTAGDTVFLDSAATALKPEVMTQATARYYQHDSGATVHRSHHRQARAVTEQFEQARDAVRQLIQAEDARSCIWTKGTTESLNLVAQGFFRPRLQPGDEIIVSELEHHSNLIPWIMLAQQTGATLVKWPLTADRTLCCDQLETLLSPRTRLVAVTQMSNVTGYQPDIARAAQLAHXHGALIIADGAQGVVHRPLNVTLSNVDFYAFSAHKLYGPNGLGVLYGRPELLSDMQPWQGGGKMLTDTDFFSFTPAPVPARFEAGTPNVAGVTAFGETLRWLDTIDLTAAHDYTIALCDSAEQQLAALPGFRSYRSPGSPLLAFNIDGIHHSDIATLLSEKNIALRHGQHCAQPLCQALGTEGCLRVSFMPYNQPDDVRQLVQAVQFALEILADD

SEQ ID NO: 6857 - DNA, 1284 bp, Citrobacter koseri
  misc_feature (1264)..(1264): n is a, c, g or t
atgaatatcctgattatcggtaatggcggacgcgaacacgcgctggcctggaaagccgcacaatccccgctggcagccaatgtttatgtcgcgcccggtaatgccggtaccgcacaggaaccaaacctgaccaatgtggatatcagtgcgacagatattgacggcctggtggcctttgcccgcgccaataatatcggcctgaccattgtcggcccggaagcaccgctggtgatgggggtggttgatgcattcaatgccgccggtctgactatcttcggcccgtcaaaaggtgccgcgcagctggaaggctccaaagcattcaccaaagattttttggcgcgtcaccatatcccgacggcagcctatcagaactttactgaggttgaaccggcactggcttatctggacaaaaccggagcaccagtggtgatcaaagctgacggcctggcggccggtaaaggcgtgatcgtcgccatgaccctgaaagaagcacaggacgcggtacatgacatgctggccggtaatgctttcggcgatgccgggcaccgcattgtgattgaagagttcctgaccggcgaagaagccagttttatcgtcatggtggacggtaaaaatgtggtgccgatggcgaccagccaggatcacaaacgggtcggtgacaatgacaccgggccaaacaccggcggtatgggcgcttactccccggcaccagtggtgaccgatgccgttcatcagcgggtgatggaaaaagtgatttacccgaccgttgaaggtatggcggcggaaggtcacacctatcagggttttttatacgccgggctgatgattgatgaacacggtgagccgaaagtgattgaattcaactgccgctttggtgacccggaaacccagccgattatgatgcggttacaatcagacctggttgagctctgccttgccggtacgcagggaaaactggccggaaaaacctcacagtgggatccgcgtccggcgcttggtgtggtgatggcagccggtggttatccgggtaattaccgtaaaggtgatgtaatcagcggactggatgttcaggaagcagactgcaaagttttccaggccggaacggcgatgaaagaaggtgcggttgtgactgacggcggccgggtgttgtgtgtgacggcactgggtgaggatattgctcaggcgcagaaacaggcttatgccgcactgaaacatattcactgggatgatgcattttgccgcagtgatatcggctaccgtgctnttgcccgtctgaataagtaa

SEQ ID NO: 6858 - protein, 427 aa, Citrobacter koseri
  misc_feature (422)..(422): Xaa can be any naturally occurring amino acid
MNILIIGNGGREHALAWKAAQSPLAANVYVAPGNAGTAQEPNLTNVDISATDIDGLVAFARANNIGLTIVGPEAPLVMGVVDAFNAAGLTIFGPSKGAAQLEGSKAFTKDFLARHHIPTAAYQNFTEVEPALAYLDKTGAPVVIKADGLAAGKGVIVAMTLKEAQDAVHDMLAGNAFGDAGHRIVIEEFLTGEEASFIVMVDGKNVVPMATSQDHKRVGDNDTGPNTGGMGAYSPAPVVTDAVHQRVMEKVIYPTVEGMAAEGHTYQGFLYAGLMIDEHGEPKVIEFNCRFGDPETQPIMMRLQSDLVELCLAGTQGKLAGKTSQWDPRPALGVVMAAGGYPGNYRKGDVISGLDVQEADCKVFQAGTAMKEGAVVTDGGRVLCVTALGEDIAQAQKQAYAALKHIHWDDAFCRSDIGYRAXARLNK

SEQ ID NO: 6859 - DNA, 801 bp, Citrobacter koseri
  misc_feature (298)..(298): n is a, c, g or t
atgccaagtgctgatctcacactcaatccgccgtacatggcgcgttatcacaaaatcatgctcagcctgattgtgatcctgctgctgttaccgattatcgcgacgctgctgtattccttctccacccgctggggtgccacggtgctgccggacggcctgacattacagtggtatctgaagctgtggcaggatccgcgttttcttgccgcgttcggccgttcactgtttatctgctttgtcacccttgccatcagcaccctggtgatcctgccgctggtgtttgccgtgttttattacntcccgcggctgaaagggctgatggagatcctgattattctgccgttcgccgtgccgccggtggtctcctccgtcggactgctgcagctgtttgctgacgggccgctgccgattgccggtacgccgtggatcctgatcggtacctatttcaccatcaccctgccgtttatgtaccgggcgctggccaacagcctgaacggtgtgccgctgaaagatctgctggatgccgctcatctgctcggtgcgggtacttttaaggcgtttctgctggtggtggtaccaaatatccgcaaagggctgctggtgtcgctgctgattgcgttctccttcctgttcggtgagtttgtgtttgccaatatcctggtcggcacccgttacgaaaccctgcaaatctatctctataacatgcgccagaccagcgggcacttcacctccgcactggtggctagctactttattttcaccctgatcctgaccctgatcgcgacacgcctgaaccgctga

SEQ ID NO: 6860 - protein, 266 aa, Citrobacter koseri
  misc_feature (100)..(100): Xaa can be any naturally occurring amino acid
MPSADLTLNPPYMARYHKIMLSLIVILLLLPIIATLLYSFSTRWGATVLPDGLTLQWYLKLWQDPRFLAAFGRSLFICFVTLAISTLVILPLVFAVFYYXPRLKGLMEILIILPFAVPPVVSSVGLLQLFADGPLPIAGTPWILIGTYFTITLPFMYRALANSLNGVPLKDLLDAAHLLGAGTFKAFLLVVVPNIRKGLLVSLLIAFSFLFGEFVFANILVGTRYETLQIYLYNMRQTSGHFTSALVASYFIFTLILTLIATRLNR

SEQ ID NO: 6861 - DNA, 477 bp, Citrobacter koseri
  misc_feature (40)..(40): n is a, c, g or t
gtgaataaccgattatttaaacaagtcatggccgcctgtnctgctggggcgattgcaggtgcgctggtgctgatccccgcatacgagggtgttgagtacaaaccttaccgtgatgtggttggagtgctcaccgtatgttacggccataccggcagtgatattcagcccggcaagctgtatacggacgctgaatgtaaggcgctgctgcatgacgacctgacgaaagtgcggcgtgcagttgacccgatgatcaaagtgccaattgatgataacacccgcgcggccatctattcatttgtctacaacgtagggtccggtgcgttctcgcgttctacgatgctgcgtaaactcaatgccggtgatatcgccggggcgtgtgacgaaatgaaacgctggacatttgccggtggcaagcagtggcaggggctgattaaccggcgcgaaacggagaaagcgatatgccacggaaccctttaa

SEQ ID NO: 6862 - protein, 158 aa, Citrobacter koseri
  misc_feature (14)..(14): Xaa can be any naturally occurring amino acid
MNNRLFKQVMAACXAGAIAGALVLIPAYEGVEYKPYRDVVGVLTVCYGHTGSDIQPGKLYTDAECKALLHDDLTKVRRAVDPMIKVPIDDNTRAAIYSFVYNVGSGAFSRSTMLRKLNAGDIAGACDEMKRWTFAGGKQWQGLINRRETEKAICHGTL

SEQ ID NO: 6863 - DNA, 1545 bp, Morganella morganii
  misc_feature (1003)..(1003): n is a, c, g or t
atgctgaaaaaatataaatacccgctgttatttgtcgctgccatgctgttgagttatctcaccaatacattcttgtatcagcgtgattcaaccggcccgcatttagccaccctgtttttggttttatgcaccattattcttctgaactgtaaacactggctgcctgccgttgcaggatttattattacactgattttttcactggaagtcggttatttcaccgaattccacgaacgaatttctgccggtattctcgattcagcactggaaacaaataattctgaagcaacactgatgctggggcactatttatattccatcatattgcctgccctgtgcataagcgtattaatttttatctgcttccggagaaaaagactccgccttccccgctggtttacattatcaccggtgttcattttcggctttctgatgatttccctgctccgtgaagtcatcccggaataccgtaatttatccattaatttcagcgaagacccttatgaactggggacgtatctccgcgagaaatttcctgttgtcgccggaaatattatgtatgtttcctccgttgctctcagccatgacaagtatacggagaattatcctgaccggaaaccaaaccgggtgctggcgtctgccggaaaaccacagaataaactcatcatctttatcatcggagaatcatcatctccgtccagatatcatatctacgggtattccaaagaaacaacaccggaaatggaacgcatttttcagggtgacaaggcctgcgtgacagacaaagtgcattcatcctccccgataacacgggattccatttcattgtcactttcattttacacaccggaaagcgaagaaaatttattccgtcagaaatcggttattgaaatagcacaggatcagggatacaaaacttactggctgggcgctcagtctctggtcggcgttaacggttcaaaatatggctatcttgcccggcggaataatactgttattgtgnaagaaaacaatgacatgaaactgcctgagttattaaagcaggcgctggccgagccagatgaatacaaatttattattctgcatttatggggcaaccacatgccttatacaaattatacagaaacagaaaagcagcagctgaatgacgccagtgactatgatctgaccattcgtcacaccgataatgtgattggccgtctttatgatgaagttgaatcagtaaccgatgactatattttcatctacacctccgatcacggagaaattgtcggtaaaggccacggtttttccaaaggcgcggatcaattcctgattccgtttttatataaatcagggaatccgtcttatggctgtgaatttattgaaaaataccgcaatcaggatggctggatcagcggattaatgaacaaatatattttatctgaactgcttggttattcattagaccagtcgattgcggaaccggataaacagcatgatcggatcctttcaactgacggttatgcgattccgttttcatcttatttcaacaagaataagtaa

SEQ ID NO: 6864 - protein, 514 aa, Morganella morganii
  misc_feature (335)..(335): Xaa can be any naturally occurring amino acid
MLKKYKYPLLFVAAMLLSYLTNTFLYQRDSTGPHLATLFLVLCTIILLNCKHWLPAVAGFIITLIFSLEVGYFTEFHERISAGILDSALETNNSEATLMLGHYLYSIILPALCISVLIFICFRRKRLRLPRWFTLSPVFIFGFLMISLLREVIPEYRNLSINFSEDPYELGTYLREKFPVVAGNIMYVSSVALSHDKYTENYPDRKPNRVLASAGKPQNKLIIFIIGESSSPSRYHIYGYSKETTPEMERIFQGDKACVTDKVHSSSPITRDSISLSLSFYTPESEENLFRQKSVIEIAQDQGYKTYWLGAQSLVGVNGSKYGYLARRNNTVIVXENNDMKLPELLKQALAEPDEYKFIILHLWGNHMPYTNYTETEKQQLNDASDYDLTIRHTDNVIGRLYDEVESVTDDYIFIYTSDHGEIVGKGHGFSKGADQFLIPFLYKSGNPSYGCEFIEKYRNQDGWISGLMNKYILSELLGYSLDQSIAEPDKQHDRILSTDGYAIPFSSYFNKNK

SEQ ID NO: 6865 - DNA, 2055 bp, Morganella morganii
  misc_feature (1555)..(1555): n is a, c, g or t
atgaaattatttctgtgcgaaaagccgtctcaggccaaagatattgcccgggtgatcggcgctcatcagcggcgggataatttttttcagggaaatggcgttcaggtcgcctgggcaagaggtcatctgctggagcaggctgaaccggaggcttatggcgcacagtttgcggccccctggcggcagagtgccttacccgttattcctgaacagtggaaaatggtggttaaaaaagacgcggtttcgttgtttcagaccataaaacagttgctcagtcaggcgacggaagtggtgattgccacggatgcggacagggaaggggaagtgattgcccgtgaattactggaggcctgtcattaccggaaaaaggtacaacgtttatggttgtctgcactggatgaggcgagtatcaggcaggcattaaataacctgttacccggcgagaaaacggcctctttatattcagcgggattagggcgggccagagcagactggcttatcggtatgaacatgacgcgtctgtttaccctcaaagcccgggaactggggtttggtgggatattgtcggtcggacgtgtccagacgccgacactggccctgattgtccggcgggaaagagaaattacgcactttgtttccaaacccttctggcgggtgaccgcctcgttgcagcatcaggggatcatttttcaggctcactggcgacctgcctcgcagtattgtgatgatgaacatcgttgtattcacgttcaggccgctcaggccgtagagcaactgtgccggcaggcagggaaagcgacggtgtgtacagtgaatgaaacgaaaggaaaagccttgccgccgttgccgtttgatctcgggacacttcagcaggcggcctcaaggcgttgggggtattctgcggataaagtgcttgaaatcgcgcaaagtctgtatgaaaaacataaggccaccacgtatccccggacggactgcgggtatctgccggtgtccatgcgtgccgacataccggttgttttagatgcattatcacaaagcgatccggccttacagaatgtgctggcacaattgcagccggcgcgaatttcccgggtctggaatgatgcaaaaattacggctcaccatgcgattataccgacccggcagacacctgatttgaacgccatgaatgaggctgaactgaatgtctataaacttatccgtgcccattatctggcgcagtttttgccggatcaggaatgggatgcaacagaggtgtttttagatataggcggacaacaatttgttgccaaagggaaagtcgaaagagtgaagggctggtctgtattatttgtgaaacatgaagacgatccgccagtaaaagaagaggcagaaaccgggctggaagccggaacagaaacattgccgtcccttcacgaaggtgaattctgtgtggtacaggaggcaaaggttgtacaactggcgacctcaccaccgaaaccgtatacggatggtacattgattgcggccatgaagaatgcgtcctcctttattaccgatccgacattaaaaaaantcctgaaagagaatgcggggctggggacagaggcaacccgggcagggatcatcaccacgctggaaaacaggaaattgattgtcaggcagaaaaaaacactccgggcgacagacaccggttgtcagctgattgatgccctgccggcagcctgtacagatccgggaatgacggcgttatgggaacaatcactcgagcaggttgcacagggaaatctgtctctggatgtgtttatgcaaaagcaaatcagctggttggcacatctcattaaaaaaggcggggaaatgccgctggcgctggatctgccaccgatgccatcctgcccgtcgtgtcatggaaagatggtcttacgggagagcagtaaaggccgtttctggagttgtcagcgttatccggattgtaaagggagtgtaccattaccggaaaaaatgcagggggttacccgggggatgaataaaagaaagaaggccgtgaagaagagcataacaggactctttacctga

SEQ ID NO: 6866 - protein, 684 aa, Morganella morganii
  misc_feature (519)..(519): Xaa can be any naturally occurring amino acid
MKLFLCEKPSQAKDIARVIGAHQRRDNFFQGNGVQVAWARGHLLEQAEPEAYGAQFAAPWRQSALPVIPEQWKMVVKKDAVSLFQTIKQLLSQATEVVIATDADREGEVIARELLEACHYRKKVQRLWLSALDEASIRQALNNLLPGEKTASLYSAGLGRARADWLIGMNMTRLFTLKARELGFGGILSVGRVQTPTLALIVRREREITHFVSKPFWRVTASLQHQGIIFQAHWRPASQYCDDEHRCIHVQAAQAVEQLCRQAGKATVCTVNETKGKALPPLPFDLGTLQQAASRRWGYSADKVLEIAQSLYEKHKATTYPRTDCGYLPVSMRADIPVVLDALSQSDPALQNVLAQLQPARISRVWNDAKITAHHAIIPTRQTPDLNAMNEAELNVYKLIRAHYLAQFLPDQEWDATEVFLDIGGQQFVAKGKVERVKGWSVLFVKHEDDPPVKEEAETGLEAGTETLPSLHEGEFCVVQEAKVVQLATSPPKPYTDGTLIAAMKNASSFITDPTLKKXLKENAGLGTEATRAGIITTLENRKLIVRQKKTLRATDTGCQLIDALPAACTDPGMTALWEQSLEQVAQGNLSLDVFMQKQISWLAHLIKKGGEMPLALDLPPMPSCPSCHGKMVLRESSKGRFWSCQRYPDCKGSVPLPEKMQGVTRGMNKRKKAVKKSITGLFT

SEQ ID NO: 6867 - DNA, 927 bp, Proteus mirabilis
  misc_feature (884)..(884): n is a, c, g or t
gtgactacaacgttatctaacgcattattgtcagatatattgcaacaaattcgtcctttaattgggcaaggaaaagtagcagattatattcctgctctcgctcaagtacctgctaatcaactggctatggccgtgtatacggttgatggtgagctttatcaagcgggtatggccgataaacgtttctctattcagtctatatcaaaagtacttagcttaacccttgcgttaacacgttatgatgaaagcgagatttggcaacgagtaggcaaagagccttcaggattaccttttaattcgttaatccagttagaaatggaaaaagggctaccacgtaatccttttatcaatgctggagcgatagtgattacggatatgttgcaatcgcgattaagcgcgccaaaacagagaatgttagaagttattcgtgcactgacgaatacagctgatatttgctataacaccgttgtggcaaaatcagagatggaacatttaagtcgcaatgctgccattgcctatctgatgaaatcgtttgataattttgataatgatgttatcaccgtattagaaacctattttcactattgctcgattgaaatgagttgtgtagagcttgttcgttgttttagctacttagcgaatcaaggaatatgtgttggaagtaaaaatcagattattacgccaagacaagcccgacaaataaatgcgttaatgttaacttgtggtatgtatgatggtgcgggagagtttgctttccgtatcggtattcccggtaagtctggggtgggaggcggtattattgctgtggttcctgatgcctttaccgtagcagtatggtcaccagaattggataaatctggtaactcattggcggggtgtgctgnccttgaattattagcaaacaaagtagggcgctcaatattttaa

SEQ ID NO: 6868 - protein, 308 aa, Proteus mirabilis
  misc_feature (295)..(295): Xaa can be any naturally occurring amino acid
MTTTLSNALLSDILQQIRPLIGQGKVADYIPALAQVPANQLAMAVYTVDGELYQAGMADKRFSIQSISKVLSLTLALTRYDESEIWQRVGKEPSGLPFNSLIQLEMEKGLPRNPFINAGAIVITDMLQSRLSAPKQRMLEVIRALTNTADICYNTVVAKSEMEHLSRNAAIAYLMKSFDNFDNDVITVLETYFHYCSIEMSCVELVRCFSYLANQGICVGSKNQIITPRQARQINALMLTCGMYDGAGEFAFRIGIPGKSGVGGGIIAVVPDAFTVAVWSPELDKSGNSLAGCAXLELLANKVGRSIF

SEQ ID NO: 6869 - DNA, 594 bp, Proteus mirabilis
  misc_feature (484)..(484): n is a, c, g or t
atgcaaaaagtggttcttgctactggaaaccccggtaaagtaacagagttagcctcattactcgctgattttggtttagatattgtcgcacaaactgagctaggtgttggctcagttgaagaaacaggtcttacttttgtagaaaacgcactaattaaggcgcgtcatgctgccaaagtaacaggcttaccggctatagctgatgattcagggatctcggttgatgcattaggtggtgctccgggcatttactctgctcgttatgcgggtattgaggcaaccgatcagcaaaatgtagataaattactcgaagcaatgaaagatgttcccgcagagaaacgtcaagctcagtttaactgtgtgttagtttatctacgccatgaaaacgatcccactccgctaattttccatggtatttggcaaggtgtgttaactcaagaaatgcagggtgatggtggatttggttatgatcctattttctttntccctgagctaaattgcactgcggcacagttaaccagagagcaaaaaaatcaatactctcaccgtggtaaagcactaaaactaatgttggatgcacttaagaatgcttaa

SEQ ID NO: 6870 - protein, 197 aa, Proteus mirabilis
  misc_feature (162)..(162): Xaa can be any naturally occurring amino acid
MQKVVLATGNPGKVTELASLLADFGLDIVAQTELGVGSVEETGLTFVENALIKARHAAKVTGLPAIADDSGISVDALGGAPGIYSARYAGIEATDQQNVDKLLEAMKDVPAEKRQAQFNCVLVYLRHENDPTPLIFHGIWQGVLTQEMQGDGGFGYDPIFFXPELNCTAAQLTREQKNQYSHRGKALKLMLDALKNA

SEQ ID NO: 6871 - DNA, 420 bp, Proteus mirabilis
  misc_feature (358)..(358): n is a, c, g or t
atgtcaaatagaacggtaatggggtttgattttggcaccaaaagtattggagccgcaataggtcaagaagttacagggacagcaaggccattagcctcctttaaagctaaagatggtattccagattggagtcaaatcgaaaaaatcattaaagactggcaaccggatttagtggtggtaggtttgcctcttaatatggacggcacagaacagctagtaactactcaagccaaaaaatttgccaatcgcttacatggacgttttggcgtacaaatcgccttacatgatgagcgccttagcacagtagaagcccgtgctcacctttttgaacaaggagggtatcgttctttagataaangtagtgtcgatgcaacctctgccgttattattttagaaagctggtttgaacggcagtattaa

SEQ ID NO: 6872 - protein, 139 aa, Proteus mirabilis
  misc_feature (120)..(120): Xaa can be any naturally occurring amino acid
MSNRTVMGFDFGTKSIGAAIGQEVTGTARPLASFKAKDGIPDWSQIEKIIKDWQPDLVVVGLPLNMDGTEQLVTTQAKKFANRLHGRFGVQIALHDERLSTVEARAHLFEQGGYRSLDKXSVDATSAVIILESWFERQY

SEQ ID NO: 6873 - DNA, 564 bp, Proteus mirabilis
  misc_feature (85)..(85): n is a, c, g or t
atgaatttactcaaccattttcttattgctatgccatcattaagcgatccgctctttcaacgctcggtcgtctatgtttgcgaanataatgaaaacggtgcaatgggtttagttattaataagccgattgaagatatctctattgaaagtgtcttagagcagttggagatattctcagtagatagagatagtgcgattagcttacaaaaaccagttatgtctggtggccctgtagcggaagagcatggttttatcttacacacccctgtttctggttttagctcaagtattaaaatcagcgatagcaccatgatcaccacatcaaaagatgtgctagaaacattaggcacagcaagacagcctgaaaaaaccttagtctcattaggatattccagttgggaaaaaggccagctcgagagagaaattttagaaaatagttggcttaccgttgaagcaaccccacaaatcatttttgataccccaattgcagagcgttggcataaagccgccgaactaattggtatcgatatccacacaatttcaccaacggctggtcatgcataa

SEQ ID NO: 6874 - protein, 187 aa, Proteus mirabilis
  misc_feature (29)..(29): Xaa can be any naturally occurring amino acid
MNLLNHFLIAMPSLSDPLFQRSVVYVCEXNENGAMGLVINKPIEDISIESVLEQLEIFSVDRDSAISLQKPVMSGGPVAEEHGFILHTPVSGFSSSIKISDSTMITTSKDVLETLGTARQPEKTLVSLGYSSWEKGQLEREILENSWLTVEATPQIIFDTPIAERWHKAAELIGIDIHTISPTAGHA

SEQ ID NO: 6875 - DNA, 786 bp, Proteus mirabilis
  misc_feature (610)..(610): n is a, c, g or t
gtggctaaagaaaaaaacaaagatagcgtcggaagaacgttcctcgttgtatttattctatgtcttgtttgttccgtggtagtggctggctctgctgttggacttaaatctaagcaagaagagcaaaagctactggataaacaacgtaatattctagatgttgctggtttattggtgcctaaaatgagcgccagtgaagtactcaaagtttacgatacacgcattaaagctaagattgtaaacttcaaaactggcgaattgacagacagtaaaggcgactttgatttaaatagcgaactacgtagcgatgaaacttctatcgcactatcacctgaagaagatattgcaaaaattcgtcgtcgcgccaataccgcagaagtttactttgttcttgatgatcaaggtaaaacccaagaagtggtactgcccgtctatggttcaggcctatggtcggtcatgtatgcctttgttgcggtagatattgatggtgtaacagcgaaggggattacctattattctcatggtgaaacgccggggctaggtggagaagttgataatccgcaatggaaggctcagtggaaaggtaaacgcttactgaatgaagaaggtntgcctgctattaaaatcgtacgtggcggggcatcagatagtccttatggtattgatggcctttcaggtgcaaccttaacctctaacggcgttcaacatatgttcgatttttggttaggtgataaaggtttcggcccattcctgaaaaaagttcgtgaaggagagatcaatggctga

SEQ ID NO: 6876 - protein, 261 aa, Proteus mirabilis
  misc_feature (204)..(204): Xaa can be any naturally occurring amino acid
MAKEKNKDSVGRTFLVVFILCLVCSVVVAGSAVGLKSKQEEQKLLDKQRNILDVAGLLVPKMSASEVLKVYDTRIKAKIVNFKTGELTDSKGDFDLNSELRSDETSIALSPEEDIAKIRRRANTAEVYFVLDDQGKTQEVVLPVYGSGLWSVMYAFVAVDIDGVTAKGITYYSHGETPGLGGEVDNPQWKAQWKGKRLLNEEGXPAIKIVRGGASDSPYGIDGLSGATLTSNGVQHMFDFWLGDKGFGPFLKKVREGEING

SEQ ID NO: 6877 - DNA, 2634 bp, Proteus mirabilis
  misc_feature (248)..(248): n is a, c, g or t
atgagcgacattgccagagaaatcacaccagttaatatcgaagaagagctgaaaagctcatatttggattatgcgatgtccgttattgtaggacgcgcattacccgatgttcgagacggactgaagccagtacaccgccgagtgctatttgcgatgaatgtactgggaaacgattggaataaaccttataaaaaatcagcccgtgttgttggggatgtaatcggtaaatatcacccgcacggtgacantgctgtctatgaaacgattgttcgtttagcacagcctttttctatgcgctacatgttggttgacggtcagggtaacttcgggtcagttgatggtgactccgcggcggctatgcgttataccgaagttcgtatggcgaagatcgcccatgaactgctggcggatttggaaaaagagacggtcgactttgttcctaactatgatggaacagaaaatataccggctgttatgccaacccgtattccaaacttgttagttaatggctcttcaggtattgccgttgggatggcaacgaatatccctccgcataacctcggtgaagttatcgacggttgtcttgcctatgttgataatgaagacatcaccatagaagaattaatggaatatattaccgggcctgattttccgactgctgcgattattaatggtcgcagaggaatattagatgcttatcgtacagggcgtggaaagatttatatccgtgctcaggctgatattgaaactgatgagaaaacgggtcgcgaaaccattatcgtgacagaaattccttatcaggtgaataaagcccgtttaattgaaaaaattgcggagcttgtaaaagataaacgtattgaaggtatcagcggattacgtgacgagtctgataaagacggtatgcgtattgttgttgagatcaaacgtgatgcagtcggtgaagtagtattaaatcacctcttttcacaaactcaaatgcaagtctcttttggtattaatatggttgcgcttcatcaaggccaaccaaaattattgaacctaaaagaaattatcgcagcctttattcgccatcgtcgtgaagtggtgactcgtcgtaccatttttgaattacgtaaagcgcgtgatcgtgctcatatcttagaagcacttgcggtcgctttggccaatatcgatcctgttattgaattaattcgtcaagcaccaaccccagcagaagcgaaagcggcattaattgcccaaccttgggatctcggtagcgtgtctgcgatgttagagcgtgctggtgatagcaatgttgctcgccctgagtggttagagccacaatttggtgtgcatgacggtaaatactatctaacagaacaacaagcacaagccattttagatctgcgtttgcagaaactaaccggacttgagcatgaaaaactgctagatgaatatcgtgaattactgctacaaattgctgagttattgcatattttgagaagccctgagcgtttaatggacgttattcgtgaagagctaacagcaattaaaacacaatataacgatcctcgtcgtactgaaatcactgaaaataccgctgatattaatatcgaagatctgattaatgaagaaaatgtggttgtgacactatctcaccaaggttacgttaaatatcagccattgactgattatgaagcgcaacgtcgtggaggaaaaggtaagtcagccgcaaggatcaaagaagaagactttatcgatcgcctactggtggctaatacacacgatactattttgtgtttctcaagtcgtggtcgcctgtactggatgaaagtttatcagttaccagaagcgagccgcggtgctcgtggtcgcccaattatcaatttattacctctagagcaagatgagcggatcaccgctattcttccagtaagagagtatgaagaaggtaaatttgtctttatggcaacggcgagcggtacggttaaaaagacaccattacaagacttcagtcgtcctcgtagtgccggtattatcgcggttaatttaaatgatggcgatgagcttatcggtgttgatttaaccgacggtagtaatgaagccatgctgttctcagcagatggtaaagtggttcgtttcgcagaagagtgtgttcgcccaatgggtcgtactgcgacaggtgttcgtggtatgaaactggttgatgatgataaagtggtttcactgatcattcctcgtggcgaaggtgatatcttaacagtgactgaaaacggttatggtaaacgtaccgttcaaagtgaatatccaaccaaaaatcgtgcaacacaaggcgttatctcgattaaagtgagtgagcgtaatggtaaagtggtaggcgctattcaagttgaagaaactgaccagattatgatgatcaccaatgccggaacgttagtgcgtacccgagtatcagaagtcagcattgtgggacgtaatacacaaggtgttaccttgatccgtactacagaagacgagctagtcgttggcttacaacgtgttgaagatgaagatgatgcattagatgatgatgaagttgatgaaatgatcagcgacaatatctctgatgttccagagtctgaaccaacagatgatgcggatagtgaagaagaataa

SEQ ID NO: 6878 - protein, 877 aa, Proteus mirabilis
  misc_feature (83)..(83): Xaa can be any naturally occurring amino acid
MSDIAREITPVNIEEELKSSYLDYAMSVIVGRALPDVRDGLKPVHRRVLFAMNVLGNDWNKPYKKSARVVGDVIGKYHPHGDXAVYETIVRLAQPFSMRYMLVDGQGNFGSVDGDSAAAMRYTEVRMAKIAHELLADLEKETVDFVPNYDGTENIPAVMPTRIPNLLVNGSSGIAVGMATNIPPHNLGEVIDGCLAYVDNEDITIEELMEYITGPDFPTAAIINGRRGILDAYRTGRGKIYIRAQADIETDEKTGRETIIVTEIPYQVNKARLIEKIAELVKDKRIEGISGLRDESDKDGMRIVVEIKRDAVGEVVLNHLFSQTQMQVSFGINMVALHQGQPKLLNLKEIIAAFIRHRREVVTRRTIFELRKARDRAHILEALAVALANIDPVIELIRQAPTPAEAKAALIAQPWDLGSVSAMLERAGDSNVARPEWLEPQFGVHDGKYYLTEQQAQAILDLRLQKLTGLEHEKLLDEYRELLLQIAELLHILRSPERLMDVIREELTAIKTQYNDPRRTEITENTADINIEDLINEENVVVTLSHQGYVKYQPLTDYEAQRRGGKGKSAARIKEEDFIDRLLVANTHDTILCFSSRGRLYWMKVYQLPEASRGARGRPIINLLPLEQDERITAILPVREYEEGKFVFMATASGTVKKTPLQDFSRPRSAGIIAVNLNDGDELIGVDLTDGSNEAMLFSADGKVVRFAEECVRPMGRTATGVRGMKLVDDDKVVSLIIPRGEGDILTVTENGYGKRTVQSEYPTKNRATQGVISIKVSERNGKVVGAIQVEETDQIMMITNAGTLVRTRVSEVSIVGRNTQGVTLIRTTEDELVVGLQRVEDEDDALDDDEVDEMISDNISDVPESEPTDDADSEEE

SEQ ID NO: 6879 - DNA, 2304 bp, Morganella morganii
  misc_feature (1405)..(1405): n is a, c, g or t
atgtcgctattacccgtatttagtcaggtactgacgttagacgcggaggtatctgataacgcattaaataatatcaggaaatcgaccaacgaaattcttgaggaaatgaagaaaatagagcagggcgcatcagcaggtattaatcgcttttttgcctttgttcaagaaatagccaccagttttaacgaattatcactggagcctgaaataaacctttcggtggacaaccaagaaattattcaagcctctgaaactgttgaaaattcgatacaaaaaatcgttaaaacggcacttagtagtactcaagaatttgatacttttttgcaaaatatcttaacggggctgacgagtttatcgcttgatgagcccataaatattgaaataaatagtggtgaaacacaagagaagatccattcaattacgtcaagcattgacgctctaaaagatgcgatgtcagtattaaattacacgagaaatttgctcagcaatgatgtggatagtgatgcaagtcatcttgcgaatttaaatgctgaatatcaggcgatggaagatcagcttgcttcattaaataatgaattaactttattaactgaggcagaaaagaaaaataaagaaaataaattagttattgatgaagtcattaaaaatctaggtgctgattacgatcaatttatcaacaccatgcaaacccaaggtattaaagcggcaatagaagaagctcaagctcaacgtcgattaagcagtagtgttgatgaaaccgggaaaagttatcagcaaaccgtcgataaaatgaaagattttatcctaaacgccataggtgctacggatattatggggacgttacaaaaggtattttctgcgtcacttgaacgttctcaagaaatcgaatcattagataaactcagtaaaaaaatgggtgttgcggcgattgatattgacgctttttcaggtgcgatggctgcaattggtggcacgaaagaagctgctcaagcggatttagccgctatggcaactgcgtttgatgatacgcaagatcccatagagcagcttttacaggtcgctgataacgttaaaaatatgagttttgatgatgcccaaaaagagctggaaaaattaggtgttgttgatgataaaaccatcgaattaatgatgaaaggtcgtcaagagctagagcgtacgatgggggtacaaaaacaattctcaggtattaacgacgacagtattgaaagtgcgatccaactcaacgccacaatacataaatttagtcaattagcggcacaattcaaaaataactttttagatatgattattcctacgctagcaaaaggcatggaatggtttgataaattagtcgatttttgtgtgaaaaataaagatattgtgattagctttttctccgccatcngcgccgctgttgctatttattatttacccgtcatgatctctgctgccgcatcgacacttgccatggcattacctattattgctattgcaacggtgattggtttattaggtgtcgcctttaaactcgtctatgacgatattatgaattttattaacggtaacgattccatgatcggccgtatattagaaaaatacccagtattaaaaagtgtgatcatgacgatatggcaggcatggcaatcattctttgaatatttaaaagaggctgtcactgttgttgctgattttgttattgctgcatgggatctaatatctaactcatttaaccaatttatacagactctagaaatagggattaataatcttattgcttgggggcaatccattattgatatctttatttttgtttctgattcagtggtgagcctatttgaatggatgtggggctgtgttgaaaagatattggattttgtcgatgaaaaaatcaacctaatacaagatatatggcaatcagccaaaagctttttcggtatggacgacgaagaaaaagaaattcgtgtggtgcaaaaggtagagcggcgattaacaaatgagggggagcttgactatatcttgccacaatctcaaacagcgacacgatattatagtcctatgcaggaggttaaatcgttaaataacggattagcaatatcgtcaaataacagtttaaacccgatgaccagtcaaatgatcagtaatcaatcaagcattaaaaacgaaagtaatgtgcaaattggtgaaatcaaaattgaaactcaagccacaaatggtgcggaggtggttaaagaaatcaagaaatcttatacagagcaagaagctaaaaatatatcgcagaatcactctagtggctggagggtgtaa

SEQ ID NO: 6880 - protein, 767 aa, Morganella morganii
  misc_feature (469)..(469): Xaa can be any naturally occurring amino acid
MSLLPVFSQVLTLDAEVSDNALNNIRKSTNEILEEMKKIEQGASAGINRFFAFVQEIATSFNELSLEPEINLSVDNQEIIQASETVENSIQKIVKTALSSTQEFDTFLQNILTGLTSLSLDEPINIEINSGETQEKIHSITSSIDALKDAMSVLNYTRNLLSNDVDSDASHLANLNAEYQAMEDQLASLNNELTLLTEAEKKNKENKLVIDEVIKNLGADYDQFINTMQTQGIKAAIEEAQAQRRLSSSVDETGKSYQQTVDKMKDFILNAIGATDIMGTLQKVFSASLERSQEIESLDKLSKKMGVAAIDIDAFSGAMAAIGGTKEAAQADLAAMATAFDDTQDPIEQLLQVADNVKNMSFDDAQKELEKLGVVDDKTIELMMKGRQELERTMGVQKQFSGINDDSIESAIQLNATIHKFSQLAAQFKNNFLDMIIPTLAKGMEWFDKLVDFCVKNKDIVISFFSAIXAAVAIYYLPVMISAAASTLAMALPIIAIATVIGLLGVAFKLVYDDIMNFINGNDSMIGRILEKYPVLKSVIMTIWQAWQSFFEYLKEAVTVVADFVIAAWDLISNSFNQFIQTLEIGINNLIAWGQSIIDIFIFVSDSVVSLFEWMWGCVEKILDFVDEKINLIQDIWQSAKSFFGMDDEEKEIRVVQKVERRLTNEGELDYILPQSQTATRYYSPMQEVKSLNNGLAISSNNSLNPMTSQMISNQSSIKNESNVQIGEIKIETQATNGAEVVKEIKKSYTEQEAKNISQNHSSGWRV

SEQ ID NO: 6881 - DNA, 234 bp, Proteus mirabilis
  misc_feature (53)..(53): n is a, c, g or t
atggcaagtttgatgcaagttcgtgattgtgtcgcgcttaacggtcgggctgntgctcgtcttgtcagccatcagcttaatatgcctgaacctatggtaaaagcgatgttagagcggcttacgttaatgggtaaattacaagaggtcgatgtagaagagtgcttggtgggtagctgtaaaagctgccctgaagccaccgcatgtcagactaaagtttatcagttacgctcctaa

SEQ ID NO: 6882 - protein, 77 aa, Proteus mirabilis
  misc_feature (18)..(18): Xaa can be any naturally occurring amino acid
MASLMQVRDCVALNGRAXARLVSHQLNMPEPMVKAMLERLTLMGKLQEVDVEECLVGSCKSCPEATACQTKVYQLRS

SEQ ID NO: 6883 - DNA, 1500 bp, Proteus mirabilis
  misc_feature (844)..(844): n is a, c, g or t
atgataaaagattataagcgttggatagtcttacttttagtatcaagtatgctgtttctaattgttgttgatgttaccgtactttataccgcactaccgcgtttaactcatgatctcaatgcgagcgcctcagaaaaactatggatcatgaatgcctatccgctgattgtcgcagggctgttgccagcagcaggtatgcttactgatagaataggtcataagacgttatttattagcggattacccctttttgccatcgcctcattatgtgcggcttattcccctagtgccaccagcttaattatttctcgtggtttcttggccatcggtgctgctatgagcatgcctgcaacgttgtctattgtgagacaagtatttactcatccacaagagcgtgccgtcgccatcggtatttggtctgctgttgcttctggtggcgcggcattagggcctttaattggtgggttgctattaaaccatttctggtggggctcagtctttttgatcaatgtccctattgtactacttgtgcttcctttctcgatttggctaattcctcacttttcgggacaacggcagcataaaattgattatttaagctcaatacttattttgattggcttagtcagcgctatttataccttaaaagagataggtaaggcttatacacaatggaatgaagtgatcatcgccacccttattgccattatttttctcacactatttgcgcggcgccaacgtcgtcaaacgcatccaatgattgattttagcctatttaaaaagcgctatttcagtgtcggtgtggcaatgtcgactctttctatggtgatcatcgtgggtattnaatttctgctaagccaacgcttacagttagtcgccggctttacaccactgaatgcagctttagtgattttacctatccctatcggctcagtattagcctctcctttggctgggttttggctagcgcgtttaggtgcagtgcgcttaattattatcggattcgccctaacattaatgggtaacttatggttaattgccatttcaaactcaccgataatgctaatgggtagcctctttttgattggctttggtttaggcattatttttaccaccgcatcgacctctattatgctaagtgtcgacgataaacaagcaggtatggccgcttctattgaagatatcgcctatgagttgggtagcgtgattggcgtgacctttatggggagtttaatgagcaccctctataccttaaaactaactttaccggatacgcttaacgtcaatagtgtcgtttatgatagtttagatgaagcacttattgtcgctgaaaagcttcccgaagcagcggcgaccctcttaatcgcacaggctaatagtgcgtttgaatatgctttttctatcgttctgatcgccacagccattgtgactacaataagcttaattgcactcccttattgcttgcgtaatgcggtaagagaaaacaagcccagccactaa

SEQ ID NO: 6884 - protein, 499 aa, Proteus mirabilis
  misc_feature (282)..(282): Xaa can be any naturally occurring amino acid
MIKDYKRWIVLLLVSSMLFLIVVDVTVLYTALPRLTHDLNASASEKLWIMNAYPLIVAGLLPAAGMLTDRIGHKTLFISGLPLFAIASLCAAYSPSATSLIISRGFLAIGAAMSMPATLSIVRQVFTHPQERAVAIGIWSAVASGGAALGPLIGGLLLNHFWWGSVFLINVPIVLLVLPFSIWLIPHFSGQRQHKIDYLSSILILIGLVSAIYTLKEIGKAYTQWNEVIIATLIAIIFLTLFARRQRRQTHPMIDFSLFKKRYFSVGVAMSTLSMVIIVGIXFLLSQRLQLVAGFTPLNAALVILPIPIGSVLASPLAGFWLARLGAVRLIIIGFALTLMGNLWLIAISNSPIMLMGSLFLIGFGLGIIFTTASTSIMLSVDDKQAGMAASIEDIAYELGSVIGVTFMGSLMSTLYTLKLTLPDTLNVNSVVYDSLDEALIVAEKLPEAAATLLIAQANSAFEYAFSIVLIATAIVTTISLIALPYCLRNAVRENKPSH

SEQ ID NO: 6885 - DNA, 822 bp, Morganella morganii
  misc_feature (712)..(712): n is a, c, g or t
atgaagcttcattttttagggacggctgcctcagaaggcataccgaatcccttctgccgttgtgaacactgtctgaaagcaagaaaattagccggtaaagatattagaacgcactcttctgctattgtggatgacattatgttgatcgatgtctcccccacttttagttaccaactgatgcgtgatggtatggacgcaacacattttgaaagtttgctatttacccatactcatcctgatcattttaatgttggtgaactatttagcagaatggaaggctatggttttgaaattaaccatcctttacatattttcggtaacgatcgcgctatcaatggctgtattgaagtattaccaggttatacgaaagagcgatttgcatttcattgcttaatccctttcgttacggtcgaaagaaatggttataaaattacgccgctgcttgctaatcatgcgaaatgggaactttgttatgtatatcatattgaaaaagacggcaaagctattttctatggccatgattcgggttggttcccagaattaacttggcaatggttagaaaacaaaccgcttgatattgttgtttttgagtgtacttatggcttaaatggaaaagatcgtacagataatcatatgagcttagaaacggtttttgccgccaaagaaaaactgcaacaacaaggctgtttacatcaagctacacagattgtcntttcgcatatctcacatagcggtaaattactgcatcatgaattagaaacggtttgtgctcctcatcatatccgtgttgcctacgacggattaacgttagaaaccaattaa

SEQ ID NO: 6886 - protein, 273 aa, Morganella morganii
  misc_feature (238)..(238): Xaa can be any naturally occurring amino acid
MKLHFLGTAASEGIPNPFCRCEHCLKARKLAGKDIRTHSSAIVDDIMLIDVSPTFSYQLMRDGMDATHFESLLFTHTHPDHFNVGELFSRMEGYGFEINHPLHIFGNDRAINGCIEVLPGYTKERFAFHCLIPFVTVERNGYKITPLLANHAKWELCYVYHIEKDGKAIFYGHDSGWFPELTWQWLENKPLDIVVFECTYGLNGKDRTDNHMSLETVFAAKEKLQQQGCLHQATQIVXSHISHSGKLLHHELETVCAPHHIRVAYDGLTLETN

SEQ ID NO: 6887 - DNA, 3804 bp, Proteus mirabilis
  misc_feature (2187)..(2187): n is a, c, g or t
atgaagcggctgtctaaatctttattattgataacccttttttgcctgattattttcgccgtagtattaagtggatttcgttattttctgcctcgtttagataattatcgccctgaaattgaaacctatttatctaaacagttcaatagcccagtcaccatgacacaggtgaaaggagaatggcaaaactttggccctgatatccaaattactgggctgtatattgataataacagtgttgaagtgagtgctgaacagatcactttctcttttgatgtttggcgttcactacttcattttcaactctattttcgtgaattaacctttgaacaattagcagtaaattacaaaaagcctatttttactgggcaaaatggtgatattactttcactgaacccgatgatatctcttccattttcttaaaacagtttgatcgatttaaattggttgatagccgtttcgtgtttttatcaccttctggtgacactagcacgctccatattcccgaattaatgtggctcaatcagaaaaaccgccatcgtgcgcaaggggaagttactttagataccccaataaatcactatggtggactaaaagtacgtcttgatctctatacgaaaaagcagggggcactcgataaaggacaggtgtttgtcaccgctgatgaggttgatatttccccttggttaagccaatgggttaaaagtaacagtggccttggtgaagcgaaagccagcctatctaattggatagagatcagcaatgggcggatcacgggtagccagttacaaatccatcaaggtgaaatggattggcgtaatgaagggcgcacacatgtattaaaggtagaagatttaattctacgtatgagacgccaagaaaatggctggcttgctgatatcccttatacccgaaaaataacgatggatggtgatgaatggccagatggttatttagcggtactttatcaacctaaagaaaaacaacaggatgaagcttggcgtatccgtgctaaaaatattgaattagaacggttatctgcgttattgcctttgttctcttttttaacgcctgatgtcgtgcgccaatggcagtatcgtcaattttctggcatggtcgactcatttgctcttgatgtagctcccgatgattttaaacgtagtgccattgatatcagttggcaaaatgttgcttggaaacgctggcaagaaatcccttctgtggcacattttaatggtcatttaaagggcacattacagcaaggagcgcttaattttgcgcttaataacagtgaaattgatactgctgagctttttaaagcgccacttaatatagaaaaaggcactggtacggtttactggcagcatcagggagattctctgtcgttatggagtcaagggattgatataaaagccacctccgcttgggttgccggtgattttcgttatcaaaaacaaggagagcatcaacaactgtctattctttcgggagtgaatgtgaccgatgccggtgagacatggcgctatttacctgaaaaatatgtcggtaaagatttaacacaatatctctctgacgcgattattgccggaaacgttaaaaacggtacgtttatttttcatggtgatccgcgggatttcccttttgaacaacataatggttggtttcaagtctatgccccagtaaaacaggcaaccttcaaatatgatagtgaatggccggcactgtttgatctcaatgttaatcttaattttatgaataacggcttatggatgtcctctgataatgttcaggttggtaaagccaccgctaaaaacttgacggcgattattgaggactataacaaagaaaaaattgttattgatgcagatattgaagccacgggcgatgatttaaaagagtattttctagcttcgcaaatggcaacgattggtcatacacttgaaatactaaaagtggctggaaaaattaacgggagtttgcatctcgacattccttttgatggcgagcaggtggtcgcttctggtcaggtaaacttaaacaataatgatgtcacattagcctttatggataccaccctagaaggtgttacgggacaatttcgttaccataatgataaattagagagtgatactttaaccgcgaattggtttggtcaacctctgacattttcttttgctggtggtgancaacgggatgcttatcaagttggtgttgatctaaaaggacaatgggatatcgcgaaaattaagggattacctaatgatatacaacataaattaagcggttttttaccttggcatggcgcggtaagtgttaatattccagaaacagcggatgtcaattatcaagtggatctgaccggacaagtgaatgcgctacaaagtcagttagctgcgccaagtaccgatgattttaaaaacgcttcccccattgtgatttcagcaaaagggaatagtgaaaaacttaacgttagtgccgatgcacaagatcagtggtcattaaatagtgaatgggcgttaggtgaaccattacgtctattacaaggtaatttagtctcttcctcgctcacactacctcaattaaatgatcaatcacgattgactattgcattgcagggattgcaaggcgataaatggctacctactttaatggctttttcatcattagccccttctgaaaacgcaatacgtttccctaccaatattcatattagtttgcctgaacttaattttgctggtcagcaatggattgcgccacaaacagaaattatgcgtgctgatgatggcgtaaaattatccttctcagggagtgagttacgaggtgacttatttgtacccaatacggcacaaccttggcaggtgaatattacctatctctattttaatggcgctagcccaacagaagaaaataaatccttaaaaatggcaaatgtgcctgatgccaaaaaagcagttcaattttcacttaaagatattcctgctatcaatttcgcctgccaagagtgttgggtgaatggattattactagggaatattgaaggtgcaatacagcctcgtgacggagcattattgttaactgcaggtaagcttaaaaatagcagtggcgagctatctgtgagtggtgtgtggtcagaagatagtttaggcaacagtatcactaagttggcaggtaaactaacggcaccggaagtcgatgaaatggcggcttactttggttatatcattccgattgttcagtcaccacttacggcagatttctcactgcagtggcacaataccccttggaattttgatctaaaaacactcaatggtgaagtgaatgcttctcttggaaaagggcgtattgaaaaggtggatgttgggcaagcgggaaaattattacgtctagtcagttttgatgccctgttacgtaagttgcaattcgactttagagatacttttagtgataattttgagtatgattccattaaaggtgatttgacggttaaacaaggtgttttaaacgcgaaaagtgttgctgtagatggtgttattgccgatattgctataaaaggtcaagtggatctgttggcgcgtaaaatggacttacaagtagtggtaactcctgaaatatcagctacagtaggcgttgctaccgcatttgctattaaccccatcgctggtgctgctgtatttgcagcttcaaaagtactggggccactttggagtaagatttcagttatacgttatcatgttaccggaacggtagaacaacccaagattgacgaagtactgcgtcaacttaaggaggatcaggcgttatga

SEQ ID NO: 6888 - protein, 1267 aa, Proteus mirabilis
  misc_feature (729)..(729): Xaa can be any naturally occurring amino acid
MKRLSKSLLLITLFCLIIFAVVLSGFRYFLPRLDNYRPEIETYLSKQFNSPVTMTQVKGEWQNFGPDIQITGLYIDNNSVEVSAEQITFSFDVWRSLLHFQLYFRELTFEQLAVNYKKPIFTGQNGDITFTEPDDISSIFLKQFDRFKLVDSRFVFLSPSGDTSTLHIPELMWLNQKNRHRAQGEVTLDTPINHYGGLKVRLDLYTKKQGALDKGQVFVTADEVDISPWLSQWVKSNSGLGEAKASLSNWIEISNGRITGSQLQIHQGEMDWRNEGRTHVLKVEDLILRMRRQENGWLADIPYTRKITMDGDEWPDGYLAVLYQPKEKQQDEAWRIRAKNIELERLSALLPLFSFLTPDVVRQWQYRQFSGMVDSFALDVAPDDFKRSAIDISWQNVAWKRWQEIPSVAHFNGHLKGTLQQGALNFALNNSEIDTAELFKAPLNIEKGTGTVYWQHQGDSLSLWSQGIDIKATSAWVAGDFRYQKQGEHQQLSILSGVNVTDAGETWRYLPEKYVGKDLTQYLSDAIIAGNVKNGTFIFHGDPRDFPFEQHNGWFQVYAPVKQATFKYDSEWPALFDLNVNLNFMNNGLWMSSDNVQVGKATAKNLTAIIEDYNKEKIVIDADIEATGDDLKEYFLASQMATIGHTLEILKVAGKINGSLHLDIPFDGEQVVASGQVNLNNNDVTLAFMDTTLEGVTGQFRYHNDKLESDTLTANWFGQPLTFSFAGGXQRDAYQVGVDLKGQWDIAKIKGLPNDIQHKLSGFLPWHGAVSVNIPETADVNYQVDLTGQVNALQSQLAAPSTDDFKNASPIVISAKGNSEKLNVSADAQDQWSLNSEWALGEPLRLLQGNLVSSSLTLPQLNDQSRLTIALQGLQGDKWLPTLMAFSSLAPSENAIRFPTNIHISLPELNFAGQQWIAPQTEIMRADDGVKLSFSGSELRGDLFVPNTAQPWQVNITYLYFNGASPTEENKSLKMANVPDAKKAVQFSLKDIPAINFACQECWVNGLLLGNIEGAIQPRDGALLLTAGKLKNSSGELSVSGVWSEDSLGNSITKLAGKLTAPEVDEMAAYFGYIIPIVQSPLTADFSLQWHNTPWNFDLKTLNGEVNASLGKGRIEKVDVGQAGKLLRLVSFDALLRKLQFDFRDTFSDNFEYDSIKGDLTVKQGVLNAKSVAVDGVIADIAIKGQVDLLARKMDLQVVVTPEISATVGVATAFAINPIAGAAVFAASKVLGPLWSKISVIRYHVTGTVEQPKIDEVLRQLKEDQAL

SEQ ID NO: 6889 - DNA, 636 bp, Morganella morganii
  misc_feature (73)..(73): n is a, c, g or t
atgataaaaaaaagcacgcttactcagttagcgcttatcataataagcattgctttatctttgccaacccttnctatggcagcgtcgccctctattgctcatcaacccccaactaaagatgatattctttaccttaaacaggatgcccctgtttttgaaaccaccattccggagataagagctaaattcaatcaaaataatgcgtcgttatttctcaatgaatataaaattatcaccaacaacgatattactattccgttagtcagggccgcgacacgaataaccccttatttatactcatcagccgtattagagcgtggcagtgaaaaaattaagagtctacagctcaccctgatccatacacttgatacgccacaaatcgaaaaagagcatcaagatactgcaatgcgctatatcactgcattagtgacacagtttgatccctccattaatgcagcgcaaattcaagaggtgctcaatttatttgctgttaaacaagatgtgcctgcttatattagccataatgtcggtgctattcgctatattattgcccacgaggacaatcaactaacgacctttgccattgaaccgattaagctttcactcaatagcaatatcgattcagctattccgtga

SEQ ID NO: 6890 - protein, 211 aa, Morganella morganii
  misc_feature (25)..(25): Xaa can be any naturally occurring amino acid
MIKKSTLTQLALIIISIALSLPTLXMAASPSIAHQPPTKDDILYLKQDAPVFETTIPEIRAKFNQNNASLFLNEYKIITNNDITIPLVRAATRITPYLYSSAVLERGSEKIKSLQLTLIHTLDTPQIEKEHQDTAMRYITALVTQFDPSINAAQIQEVLNLFAVKQDVPAYISHNVGAIRYIIAHEDNQLTTFAIEPIKLSLNSNIDSAIP

SEQ ID NO: 6891 - DNA, 1005 bp, Escherichia coli
  misc_feature (776)..(776): n is a, c, g or t
atgttaaaacgatggggattattgacgacgctagcgctgacggcactgtttacacaaagcatctgggcgaaggatattcagttattaaatgtttcttacgatccgactcgagagctttatcaacaatataaccacgcatttagtcaatattggcaacaaaaaaccggcgatcatgtgactattcgtcaatctcatggtggctctggtaaacaggcaaccgccgtaattaatggtattgaagcggatattgtcaccctcgcattagcttatgatattgatgccattgcacaaagagggcgtatagataagcagtggatcacccgcttacctgataactcagcaccttacacctcaaccattgtttttttagtgagaaaaggtaatcccaaacagataaccgactgggattctttaattaaacccggtgtatcgattatcacacctaatcctaaaacctccggtggagcaagatggaattatctggctgcatggggatatggattaaaggccaatcagcaagacagtgaaaaagcgaaagcctttgtaaagtcactgtatcaacaggttgaagtcttagactccggcgcgagaggcgcgacaaatacttttgttgagcgtggtattggtgatgtgttaattgcatgggaaaatgaagcgttattggcgattaatgagttaggtacagataagtttgaaatagtcaccccttccgtctctattttggcagagccaaccgtctctgtggtggataaagtggttgataagcgaggtacgcnggaagtggcaaccgcttatttagagtatctttattcacctcaagggcaagaaattgctgctaaaaactattatcgtccaagagataaaagcattgctgagaaatatcaaaaacgttttccaaccctgcaattattcactattgatgagctttttggcgattggcaatcagcacaacaaactcattttgccaccgggggaatatttgatgaaatcagccgacgtgattag

SEQ ID NO: 6892 - protein, 334 aa, Escherichia coli
  misc_feature (259)..(259): Xaa can be any naturally occurring amino acid
MLKRWGLLTTLALTALFTQSIWAKDIQLLNVSYDPTRELYQQYNHAFSQYWQQKTGDHVTIRQSHGGSGKQATAVINGIEADIVTLALAYDIDAIAQRGRIDKQWITRLPDNSAPYTSTIVFLVRKGNPKQITDWDSLIKPGVSIITPNPKTSGGARWNYLAAWGYGLKANQQDSEKAKAFVKSLYQQVEVLDSGARGATNTFVERGIGDVLIAWENEALLAINELGTDKFEIVTPSVSILAEPTVSVVDKVVDKRGTXEVATAYLEYLYSPQGQEIAAKNYYRPRDKSIAEKYQKRFPTLQLFTIDELFGDWQSAQQTHFATGGIFDEISRRD

SEQ ID NO: 6893 - DNA, 1704 bp, Proteus mirabilis
  misc_feature (1516)..(1516): n is a, c, g or t
atgaaaactatctcacgtcaagcttatgcggatatgtttggcccaacaacaggcgatcgtttgcgattagcagataccgagctgtttcttgaaattgaaaaagatttcaccacttatggcgaagaggtcaaatttggtggtggtaaagttattcgtgatggtatggggcaaagccaagttgttagtgctgagtgtgtcgatgttctgatcaccaatgccattattttagattattggggcattgtaaaagcagatattggtattaaagatggccgtattgtcggtattggcaaggcaggtaatccagatgttcagcccaatgtggatattgtcattggccccggaacagaagttgtcgcgggagaaggtaaaattgtcactgctggtggtattgatacccatatccactttatttgtccgcaacaagcccaagaaggtctcgtttctggcgtaaccacctttattggtggaggaacaggccctgtggcaggtactaatgcaaccacagttacccccggtatttggaatatgtaccgcatgttagaggcggtggatgaattacctattaatgtggggttatttggtaaaggttgtgtcagtcagcccgaagcaatccgcgaacaaataacagcgggtgctataggtcttaaaatacatgaagactggggggcaacgccaatggcaattcacaattgccttaatgtcgccgatgaaatggatgtacaggtggctattcactctgacaccttaaatgaaggtggtttttatgaagagacagtaaaagccattgccggtcgagtgatccatgtattccataccgaaggcgcaggtggtggtcatgcccctgatgtgatcaagtcggtaggagagcccaatattttacctgcatcaaccaacccaacgatgccttataccattaataccgtggacgagcatcttgatatgttgatggtctgtcatcatctcgatccctctattcctgaagatgtggcatttgctgaatctcgtattcgtcgcgaaaccattgctgcagaagatatcttacatgatatgggggcaatttcggtgatgtcgtcagactcacaagccatgggacgagtcggagaagttatcttacgcacttggcagtgtgcacataaaatgaaattgcaacgaggcacattagcgggtgatagcgcagataatgataataatcgtattaaacgttatatcgctaaatacacgattaacccggcactggcacatggtattgctcatacggtgggatcaatagaaaaaggtaaacttgcggatatcgtgctatgggatcctgctttctttggcgtcaaaccggcacttatcataaaaggtggtatggtcgcttatgcgccaatgggggatattaatgcggctattccaaccccgcaaccggttcattatcgtccaatgtatgcctgtttaggaaaagccaaatatcaaacgtcgatgatctttatgtcaaaagcgggtattgaggcgggagtgccagaaaaattangcttaaaaagcttaattggtcgtgtggagggctgtcgtcatatcacaaaagcttcgatgatccacaataactatgttcctcatatcgaattagatccacaaacttacattgttaaagcggatggtgtaccactggtttgtgagccagcgactgaattaccgatggctcaacgctatttcttattttaa

SEQ ID NO: 6894 - protein, 567 aa, Proteus mirabilis
  misc_feature (506)..(506): Xaa can be any naturally occurring amino acid
MKTISRQAYADMFGPTTGDRLRLADTELFLEIEKDFTTYGEEVKFGGGKVIRDGMGQSQVVSAECVDVLITNAIILDYWGIVKADIGIKDGRIVGIGKAGNPDVQPNVDIVIGPGTEVVAGEGKIVTAGGIDTHIHFICPQQAQEGLVSGVTTFIGGGTGPVAGTNATTVTPGIWNMYRMLEAVDELPINVGLFGKGCVSQPEAIREQITAGAIGLKIHEDWGATPMAIHNCLNVADEMDVQVAIHSDTLNEGGFYEETVKAIAGRVIHVFHTEGAGGGHAPDVIKSVGEPNILPASTNPTMPYTINTVDEHLDMLMVCHHLDPSIPEDVAFAESRIRRETIAAEDILHDMGAISVMSSDSQAMGRVGEVILRTWQCAHKMKLQRGTLAGDSADNDNNRIKRYIAKYTINPALAHGIAHTVGSIEKGKLADIVLWDPAFFGVKPALIIKGGMVAYAPMGDINAAIPTPQPVHYRPMYACLGKAKYQTSMIFMSKAGIEAGVPEKLXLKSLIGRVEGCRHITKASMIHNNYVPHIELDPQTYIVKADGVPLVCEPATELPMAQRYFLF

SEQ ID NO: 6895 - DNA, 2019 bp, Proteus mirabilis
  misc_feature (1495)..(1495): n is a, c, g or t
atggcacactattcttatttatttactccccttgatttagggtttactacgcttaaaaatcgtattttgatgggctctatgcataccggactagaagaagatccacatgatgcacctaagcttgctgaattttatgctcaaagagctgcagcaggggtggcacttattgtcaccggtgggatctcccctaataagcaaggtgtattgttgccacatgcagcaacgctaatgtcagaagatcaactcgcttctcatcaattagtcactgatgcggtacataaacaggatgggaaaatcgctttacagattttacatactggtcgttatagttatcagcctaatttagtcgccccttcagcgatccaatcgcctatcaccccttttatgccccaagcaatgagtcatgagcagatagaacagactattgaagattatattcattgcgctaagttggctcagaaagcaggctatgatggtgttgagatcatgggatctgaaggctatttaattaaccagtttttagtaagtcatacgaatcaacgcgatgatcaatggggtggctctattgaaaatcgttgtcgttttgcattacgtattttagctggcataagagaagctgtaggtgaacactttatcattatctatcgtttatcaatgttagatttaattaccgagggagctaatgcctcagaggtattttatcttgctcaagcagtagaaaaggccggagcaaccctaatcaatagtggtattggttggcatgaagcccgtatccccactattgccactatggtaccaagaggacaatttgcttatgtcactcgccaattgatgggaaaaatcaacattcctcttatcacttctaatcgtatcaatacacctcaagtggctgaagctattttagcggaaggctgtgcagatatggtgtctatggcgcgtccttttcttgccgatccgcaattcgtattgaaagcgcaacttggtcgcgaggatgagataaacacctgtattgcctgcaaccaagcttgcttagatgagatattcagtggtcacccagcatcttgtcttgtaaacccttttgcctgtcgagaaacagagcttattttaaccccgactcaagcccctaaaaaaattgctgtcgttggcgcaggcccggcaggattagcatttgccattacagcagctaaacgtggtcatcatattactttatttgaaaaagaagagcgtattggtggacaactcaatattgccagtcaaattccgggtaaagaagaatttaaagagacattgcgctactttaagcggcaattgcaaatcacaggggtgatcgtaaaaaataatacggaagcgacactttcccatctgcaacattttgatgaaattattttagccagtggtgttatccctcatattccagagattgatggccatgataatccgatagtaaaaacctatcttgatgtccttaaataccatcagccaaccggcgaaaaantggtgattattggcagtggtggtattggttttgacactggcctttatcttacccaaacaggccaatgcagtagtttaagcccttgtgcatttaataaagagtggggaattgacccaacacttacgcatcgcggagggatcacctccgccgatccttttattaaaaaagacaaacagattgttatgacgcaacgtaaaagtgggaaatttggcttaagtttaggtaaaacaacaggctggatacatcgcttaacattgcagaaaaaaggggtcaaatggctaacgggctgccattatcaaaaaattaccgagcaaggagtaataattgaacataatgaacaacagcaactgctcgcggctgatagcgtgattttatgtaccggacaacaatcttatcgtccgctactgcaagcgttacaacaagaaaataaaaccgtccatcttattggcggggcaaaagaggctaaagcattagatgccaaacgagccattaagcagggaacagaattagcacttactatttaa

SEQ ID NO: 6896 - protein, 672 aa, Proteus mirabilis
  misc_feature (499)..(499): Xaa can be any naturally occurring amino acid
MAHYSYLFTPLDLGFTTLKNRILMGSMHTGLEEDPHDAPKLAEFYAQRAAAGVALIVTGGISPNKQGVLLPHAATLMSEDQLASHQLVTDAVHKQDGKIALQILHTGRYSYQPNLVAPSAIQSPITPFMPQAMSHEQIEQTIEDYIHCAKLAQKAGYDGVEIMGSEGYLINQFLVSHTNQRDDQWGGSIENRCRFALRILAGIREAVGEHFIIIYRLSMLDLITEGANASEVFYLAQAVEKAGATLINSGIGWHEARIPTIATMVPRGQFAYVTRQLMGKINIPLITSNRINTPQVAEAILAEGCADMVSMARPFLADPQFVLKAQLGREDEINTCIACNQACLDEIFSGHPASCLVNPFACRETELILTPTQAPKKIAVVGAGPAGLAFAITAAKRGHHITLFEKEERIGGQLNIASQIPGKEEFKETLRYFKRQLQITGVIVKNNTEATLSHLQHFDEIILASGVIPHIPEIDGHDNPIVKTYLDVLKYHQPTGEKXVIIGSGGIGFDTGLYLTQTGQCSSLSPCAFNKEWGIDPTLTHRGGITSADPFIKKDKQIVMTQRKSGKFGLSLGKTTGWIHRLTLQKKGVKWLTGCHYQKITEQGVIIEHNEQQQLLAADSVILCTGQQSYRPLLQALQQENKTVHLIGGAKEAKALDAKRAIKQGTELALTI

SEQ ID NO: 6897 - DNA, 1557 bp, Morganella morganii
  misc_feature (483)..(483): n is a, c, g or t
atggatgtgattggcagacaacacttacggcaaatgtgggatgatttagctgaagtttatgataaaaaaacagcgctaatttttgaatctgcacaagggaaagtcagacaatttagctacagtgaattaaatgaagagatcaacagagccgtaaatctttttcatgcctgtggtataaaaaaaggcgaccatgttgccttacatcttgataactgcccagaatttttcttttgctggtttggactggcaaaaattggcgctattatggtgcccattaatgcccgctttatgtatgaagagagtgcttggatcattaaccattgccaagcacactttgtggtaacaagtgataatttctctccaatttaccaaccgatgttgcacgataagcactctcctttaacgcaactgtttttaataacagaaaacagcctccctactgaacaaggagttgttgattttttaagtgaaaaagccaagcancccgttacgcttaatcatcacaccccattaagtgtggatgacacggctgaaatcctttttacctcaggtactacttcacaacccaaaggggtggttattacacattataatttacgttttgctggctactactcctcatggcagaacgccttacgggaagatgatatctatcttacagttatgcctgcttttcatatcgattgtcagtgtaccgcatcacttcctgctttttctgtcggtgccacatttgtactactggaaaaatacagtgcgagagccttctggaagcaaattctcaaataccaagcaacggtaacagaatgcatacctatgatgatgcgcaccttaatggcacaaccagtctcaccagatgaaaagcaacataaactgcgcgaagtgatgttttacctcaatcttgcagatgaagagaaagatgcctttattgaacgctttaatgtgcgattactcacctcttacggcatgacagaaaccattgttggcttaatcggtgacagacctggcgataaacgccgctggccatctattggtagaccgggattttgttatcaagcgcaaattcgcgacaaacaaaatcagcaagttcctaacggtgtagtcggtgagatctgcgtcaaaggtgaaccgggaaaaaccttatttaaagagtattacaatcgccccgatgcaacagaaaaagcgctagagcctgatggttggttacacacaggtgactatggttatcgagatgacgaaggctttttctattttgttgatcgcagttgcaacatgatcaaacgcggtggtgaaaacgtctcttgtattgaaattgaaaatatcatcgcatcacatcctaaaatccaagatgtagcagtaattggtgtacctgatgatattcgcgatgaagccattaaagcttttgtggtactggttgacggtgaaacgttaagtgaagaagcctttttcgccttttgtgaacagaatatggcgaaatttaaagtgccttccgccgttgagtttaaacaggggttaccacgtaattgctcaggcaaagtgatcaaaaagcatttgaaatag

SEQ ID NO: 6898 - protein, 518 aa, Morganella morganii
  misc_feature (161)..(161): Xaa can be any naturally occurring amino acid
MDVIGRQHLRQMWDDLAEVYDKKTALIFESAQGKVRQFSYSELNEEINRAVNLFHACGIKKGDHVALHLDNCPEFFFCWFGLAKIGAIMVPINARFMYEESAWIINHCQAHFVVTSDNFSPIYQPMLHDKHSPLTQLFLITENSLPTEQGVVDFLSEKAKXPVTLNHHTPLSVDDTAEILFTSGTTSQPKGVVITHYNLRFAGYYSSWQNALREDDIYLTVMPAFHIDCQCTASLPAFSVGATFVLLEKYSARAFWKQILKYQATVTECIPMMMRTLMAQPVSPDEKQHKLREVMFYLNLADEEKDAFIERFNVRLLTSYGMTETIVGLIGDRPGDKRRWPSIGRPGFCYQAQIRDKQNQQVPNGVVGEICVKGEPGKTLFKEYYNRPDATEKALEPDGWLHTGDYGYRDDEGFFYFVDRSCNMIKRGGENVSCIEIENIIASHPKIQDVAVIGVPDDIRDEAIKAFVVLVDGETLSEEAFFAFCEQNMAKFKVPSAVEFKQGLPRNCSGKVIKKHLK

SEQ ID NO: 6899 - DNA, 678 bp, Serratia marcescens
  misc_feature (646)..(646): n is a, c, g or t
atgtttacgccaccagcagcacctgaaaatgaatccgttttactcgcacgagcacaagcgctggctggttataccttcggtgaactcgccgcttttgcacagcttcctattcctgaaaatttaaagcgtgataaaggttgggtcggtatgctattggaatactatttaggtgccagtgccggcagtaaacctgaacaagatttttctcatatcggtgttgagctaaaaaccatccctatcgaccgttttggtatgccattagaaacgacctttgtttgtgtagccgcacttacaggaaacagtgggatcacatgggagaatagccatgtaaaacgtaagctgtcgaaagtattatgggtacctgtagagggagaacgggagatcccattagcacaacgtagagtcgcttccccgctactttggagccccaatcatcttgaagaagagctactgcgtcacgattgggaagagttaatggatatgattgtcttaggaaaagtagaaagcattactgcgcgtcacggacaagtattacaaattcgccctaaggctgctaacagtaaggcattaaccgaagccattggtgaaaatggacaacgcatcatgacacttccccgtggtttttatttaaaaaagaactttacancgccactgattgctcgttatttccaactttaa

SEQ ID NO: 6900 - protein, 225 aa, Serratia marcescens
  misc_feature (216)..(216): Xaa can be any naturally occurring amino acid
MFTPPAAPENESVLLARAQALAGYTFGELAAFAQLPIPENLKRDKGWVGMLLEYYLGASAGSKPEQDFSHIGVELKTIPIDRFGMPLETTFVCVAALTGNSGITWENSHVKRKLSKVLWVPVEGEREIPLAQRRVASPLLWSPNHLEEELLRHDWEELMDMIVLGKVESITARHGQVLQIRPKAANSKALTEAIGENGQRIMTLPRGFYLKKNFTXPLIARYFQL

SEQ ID NO: 6901 - DNA, 4734 bp, Proteus mirabilis
  misc_feature (3571)..(3571): n is a, c, g or t
atgaaatcaaaaaactttaaactttcaccctccgggcgacttgctgcgtctttagcaataatttttgtctctcttaatgcttatggcaatggcatcgtgcccgatgcaggccatcaagggccggatgtctctgctgttaatggtggtacgcaagtgattaatatagtcacgccaaataacgaagggatttctcataaccaataccaagacttcaatgttggcaagcctggggctgtatttaataacgcattagaagcgggacaatctcaacttgcgggtcatttaaacgctaacagcaatttaaatggtcaagctgcctctttaattttgaatgaagttgttagccgcaacccatcattcttattaggtcagcaagaggtctttggtatcgctgctgaatatgtgctttctaacccaaatggtatcacatgtgatggttgtggttttataaataccagccgctcttcattagttgttggtaatccgctctttgaaaatggtcagctaaaaggctatagcaccctcaacaacaccaatttactatcgcttggtaaaaatggcttaaatacaacagggttgttagacttaattgctcctcgtattgatagtagagggaaaatcactgccgctgaaatttcagcctttactggacaaaacaccttctcacaacattttgatattctctcttcacaaaaacccgtttcagcattagatagctatttctttggtagtatgcaatcgggtcgtatccgcattattaatacggctgaaggtagtggagttaaattagcaggtaaatttaccgcagataacgacctaagtgttaaagccgataatattcaaacagatagtcaagtccgttatgacagttacgataaagatggcagtgaaaattaccaaaactatcgtggcgggatcacggttaataatagtggctctagtcaaacactcactaaaaccgaattaaaaggtaaaaacatcacattagtagcgagtagccataatcaaatcaaagcctctgatttaatgggggatgatatcactttacaaggtgctgatttaactatcgaagggaaacaactacagcaaaaagagaccgatattgataatcgctggttctactcgtggaaatacgatgtgactaaagagaaagaacaaatacagcaaattggtagccaaattgatgctaaaaataatgcgacattaaccgcaactaaaggagatgttaccttagacgcggctaaaattaatgcggggaataaccttgcaattaatgccaataaagatatccatatcaatggattagttgagaaagaaagtcgtagtgaaaatggcaataaacgtaatcatacttctcgcttagaaagtggtagttggagtaacagccaccaaactgagacgttgaaagccagtgaattaacggcaggtaaagatcttggtttagatgctcaaggctcaataacggcgcaaggtgctaaactgcatgcgaatgaaaatgtgctggtcaatgccaaagataacattaatttaaacgtccaaaaaaccaataatgataaaacagtcaccgataatcatgttatgtggggaggtattggtggtggtcagaataaaaataataataatcaacaacaagttagtcatgcaacacaattaaccgctgatggtcaattgctccttgctgcagataacaatgtcaacattaccggtagccaagtaaaaggcaaccaaggtgcttttgttaaaaccacacaaggtgatgtcgtcattgataatgcgctgagtgaaaccatcagtaaaatcgatgaacgcacaggaaccgcgtttaatatcactaaaagttcacataaaaatgaaactaataaacaaacatctacaagtagtgaactcatttccgatgcacaattgaccgttgtcagtggcaatgatgttaatgtcattggtagtttgatcaaaagcgctgataaattaggtattcattctttaggtgatatcaacgttaaatcagcacaacaagtcactaagattgatgatgaaaaaacatcattagccattactgggcacgccaaagaagttgaagacaagcaatatagtgcgggctttcatatcactcataccaccaataaaaatactagtactgaaacagagcaagctaactcaaccattagtggcgccaatgttgatctgcaagcgaataaagatgtgacttttgcgggatctgatctaaagactaccgcagggaatgcctctattacgggtgataatgttgcctttgttagcacggaaaataaaaaacaaacggacaacacagataccactatttcaggaggttttagctacacaggaggtgtagataaagtcggttctaaagccgattttcaatatgacaaacaacatacacaaacagaggtaacaaaaaatagaggcagccaaacagaggtttcaggtgatttgactattaccgcgaacaaagatttgcttcacgaaggagcttctcaccatgttgaggggcgttatcaagagtctggtgaaaatattcagcatcttgccgtcaatgatagtgaaacatctaaaactgacagcttaaatgttggtatcaatgttggcgttaatcttgattatagcggtgtaacgaagccagttaagaaagcaatcgaagatggtgttaacacaaccaaaccgggtaacaataccgatttaactaaaaaagttacagcaagagatgcaattgctaatttagctaaccttagcaatttagagacccccaatgtcggtgttgaagtgggtattaaaggtggtggtagtcagcaatcacaaaccgatagccaagccgtttcaacctctatcaatgcaggaaaaatcaacattgatagtaataataagttacatgatcaaggtactcactatcaatcaacccaagaaggtatttctctcacagcaaacacccacacaagtgaggtcgcgcaagataaacatcaaacgacattccatgaaacaaaaggcggtggacaagttggtgtcagtaccaaaacgggcagtgatattaccgttgctattaaaggtgaaggccaaacaactgataacgccttaatggaaacaaaggctaaaggtagccaatttacctcaaatggcgatatttcgattaatgtaggtgaagatgcccattatgaaggtgctcaatttgatgcacaaaagggcaaaacagttatcaatgcggggggtgatctcactcttgcacaggcgactgatactcatagcgaaagtcaatctaatgttaatggtagtgcaaatctgaaagtgggcaccacgccagagagtaaagactatggtggaggtttcaatgcagggaccactcatcacagcaaagagcagactaccgcaaaagtgggcgctatcactggctctcaagctattgaattaaacgctgggcataacctgactttacaaggtactcatttaagtagcgaacaagatattgcattaaatgcaactaataaagtcgacctacaatcagcgagctctgagcgtactgaaaaaggcaataatttatctggaggagtacaagcaggttttngtaaaaaaatgaccgatgatgcttcatctgtgaatggtttaggtagtgcccaatttgctattggtaaacaagatgagaaaagcgtatctcgagaaggaggaacgattaataactcaggaaacttaacgattaatggcaatagcgtccatcttcaaggagcacaagttaatagtaaagatactcagttaacatcacaatccggtgatatcgagatcacatctgcgcagtctactgattataaaaacaattggggaacagatattggctttaatggcaaaaaaaccagtaccaccccaaaagaagttacagaggagaaacctgctacctctattcataacatagggggtaaattactggttaacgtggaagatcaacaaaaaacgagccaccaaaatgcaaccttagaaacaggtacattaacgattaatagtaataaagatctgacactatctggtgctaatgtgactgctgatagcattacgggtaatgtcggtggttcactcaatattgctagccaaaaagagagtgatcgccatgtcactgttggcgtcaatgttggctataaccacaccaatgatcctaaatcaagccaagtgaataaaacggctaaagccggagggtcattattagagaaaactatcaaagatacgattgattcaggaattaaatcatcaaccgatgctatctctgataaatacaattccctctcttcaactattgcagataaaacaggtatcagtgatgaaactaaagccaaaattgatcaaggttttggtaaagttggtaatggtattaagaatatcgtcacaggtgctgaaggtcatactgctaatgcagatatcaaagtcactcatgtagataatgatgctgtcactaaaaccacctccttaactagcaacaacgacctatcattaaatgtgaatggctcgacaaaactcaccggagcagaaattgcgagtaaacaaggccaagttgatttagggggaagtagcgttaaattagaaaatattgaaggacatcattatgaagccggcgctgatcttggtctgaaatcctctgtggtggatttagcaaaacaactggtaggtggagatatttcttttaaatcccccgttaaaacgaatgaaaccgtcaatacaaaagcatctatttctgaaaaatag

SEQ ID NO: 6902 - protein, 1577 aa, Proteus mirabilis
  misc_feature (1191)..(1191): Xaa can be any naturally occurring amino acid
MKSKNFKLSPSGRLAASLAIIFVSLNAYGNGIVPDAGHQGPDVSAVNGGTQVINIVTPNNEGISHNQYQDFNVGKPGAVFNNALEAGQSQLAGHLNANSNLNGQAASLILNEVVSRNPSFLLGQQEVFGIAAEYVLSNPNGITCDGCGFINTSRSSLVVGNPLFENGQLKGYSTLNNTNLLSLGKNGLNTTGLLDLIAPRIDSRGKITAAEISAFTGQNTFSQHFDILSSQKPVSALDSYFFGSMQSGRIRIINTAEGSGVKLAGKFTADNDLSVKADNIQTDSQVRYDSYDKDGSENYQNYRGGITVNNSGSSQTLTKTELKGKNITLVASSHNQIKASDLMGDDITLQGADLTIEGKQLQQKETDIDNRWFYSWKYDVTKEKEQIQQIGSQIDAKNNATLTATKGDVTLDAAKINAGNNLAINANKDIHINGLVEKESRSENGNKRNHTSRLESGSWSNSHQTETLKASELTAGKDLGLDAQGSITAQGAKLHANENVLVNAKDNINLNVQKTNNDKTVTDNHVMWGGIGGGQNKNNNNQQQVSHATQLTADGQLLLAADNNVNITGSQVKGNQGAFVKTTQGDVVIDNALSETISKIDERTGTAFNITKSSHKNETNKQTSTSSELISDAQLTVVSGNDVNVIGSLIKSADKLGIHSLGDINVKSAQQVTKIDDEKTSLAITGHAKEVEDKQYSAGFHITHTTNKNTSTETEQANSTISGANVDLQANKDVTFAGSDLKTTAGNASITGDNVAFVSTENKKQTDNTDTTISGGFSYTGGVDKVGSKADFQYDKQHTQTEVTKNRGSQTEVSGDLTITANKDLLHEGASHHVEGRYQESGENIQHLAVNDSETSKTDSLNVGINVGVNLDYSGVTKPVKKAIEDGVNTTKPGNNTDLTKKVTARDAIANLANLSNLETPNVGVEVGIKGGGSQQSQTDSQAVSTSINAGKINIDSNNKLHDQGTHYQSTQEGISLTANTHTSEVAQDKHQTTFHETKGGGQVGVSTKTGSDITVAIKGEGQTTDNALMETKAKGSQFTSNGDISINVGEDAHYEGAQFDAQKGKTVINAGGDLTLAQATDTHSESQSNVNGSANLKVGTTPESKDYGGGFNAGTTHHSKEQTTAKVGAITGSQAIELNAGHNLTLQGTHLSSEQDIALNATNKVDLQSASSERTEKGNNLSGGVQAGFXKKMTDDASSVNGLGSAQFAIGKQDEKSVSREGGTINNSGNLTINGNSVHLQGAQVNSKDTQLTSQSGDIEITSAQSTDYKNNWGTDIGFNGKKTSTTPKEVTEEKPATSIHNIGGKLLVNVEDQQKTSHQNATLETGTLTINSNKDLTLSGANVTADSITGNVGGSLNIASQKESDRHVTVGVNVGYNHTNDPKSSQVNKTAKAGGSLLEKTIKDTIDSGIKSSTDAISDKYNSLSSTIADKTGISDETKAKIDQGFGKVGNGIKNIVTGAEGHTANADIKVTHVDNDAVTKTTSLTSNNDLSLNVNGSTKLTGAEIASKQGQVDLGGSSVKLENIEGHHYEAGADLGLKSSVVDLAKQLVGGDISFKSPVKTNETVNTKASISEK

SEQ ID NO: 6903 - DNA, 2415 bp, Proteus mirabilis
  misc_feature (1391)..(1391): n is a, c, g or t
atgtcgaatacatatgactcctcaagtatcaaagtattaaaagggctggatgcggtgcgtaagcgcccggggatgtatatcggggatacagatgatggaaccggtctgcatcacatggtcttcgaggtggtcgacaacgctatcgacgaagccctcgcgggttactgtgatgagattattgtcactatccattcagataactcagtctctgttcgcgatgatggccgtggtattccaacgggtattcatgaagaagagggcgtttctgcagcagaagtgattatgacggttctgcatgcgggtggtaaattcgatgataactcctataaagtctctggtgggctgcatggtgtaggggtttccgttgttaatgcgttgtctgaaaaacttgaactgactatccatcgtgatggtaaaattcatcaacaaatttaccgttcaggtgtacctgacgatcgcttaaaagtgattggtgaaacagataagtcaggaacctttgttcgtttctggccaagtcttgatacctttaaaggtgagactgaattccaatatgatattttagcgaaacgtctgcgtgagctctccttcttaaactcaggagtctctattcgtttaattgataaacgtgataaccgcgaagatcatttccactatgaaggtggtatcaaagcattcgttgaatacttaagccgtaataaaacgcctattcaccaaaatgtattctatttttctacagagaaagatggcattggtgttgaagtggcgatgctgtggaatgatggtttccaagaaaacgtttattgctttaccaataatattccacaacgtgatggtggtactcacttagttggtttccgtaccgcgatgactcgtacgctaaacaactatatggataaagaaggctttaataagaaatcgaaaatcagtgcaacgggtgatgatgctcgtgaaggcctgattgcggttatttctgttaaagtacctgatccgaaattctcatcacaaacgaaagataaactggtttcttctgaagttaaaacagcggtagaaacgctgatgaatgagaagctggtggaatatctattagaaaatccgactgacgcaaaaattgttgtcggtaaaattattgatgctgctcgtgcccgtgaagctgcgcgtaaagcacgtgagatgacgcgtcgtaaaggcgcactcgatttaggtggtttaccgggtaaattggcggactgctctgagcgtgatcctgctttttctgaactctacttagtggaaggggactctgcgggtggctcggcaaaacaagggcgtaaccgtaaaacgcaagccattttaccgttaaaaggtaagatcttaaacgttgaaaaagcgcgttttgataagatgctggcatntcaagaagtggcaacgcttatcacggcattaggttgtggtattggccgtgatgaatataacccagataaactgcgttatcacagcattattatcatgacggatgcggacgtcgatggttctcacattcgtacattattactgacgttcttctatcgccaaatgccagaaattatcgaacgtggtcatatctttattgctcagccacctctctataaagtgaaaaaagggaaacaagagcaatacattaaagatgatgatgcgatggatgaatatctgatgtctattgcgcttgatggtgcagcgctttacgtcagtgaacatgcccctgctatgcatggtgcacaattagaaaaactggttgttgactaccatgctgcgcataaaattattcgtcgtatggagcgtctctatccactgagtatgttaaatagcttggtctatcactcaacgctgacagaagatgatctctctgataaagcgaaagtggaagagtggatgagtggcttggtgaaccgtttaaataacgcggaagagcaaagcagtacttacagctataccatcacacaaaacgaagaaaatcgtttatttgagccagtattacgcattcgtacttacggtatcgatacagactataaattggattacgattttattcatagtagtgaatatcaacgtattactaatttgggcgatattattggtaacctgattgaagaaggagcctatattgagcgtggagaacgtcgtcaggcgatttcaagctttgaagaagccctagaatggttaaccaaagaatcacgtcgtggtcttgctgtacagcgttataaaggtcttggtgaaatgaacccagaacaattatgggaaaccaccatgaacccagatacgcgtcgtatgatgcaagtcactgtgaaagatgcgattgctaccgatgagttattcacaaccttaatgggtgatgctgttgaacctcgtcgtgcttttatcgaagaaaatgcactaaaagcagaaaatatcgatatctaa

SEQ ID NO: 6904 - protein, 804 aa, Proteus mirabilis
  misc_feature (464)..(464): Xaa can be any naturally occurring amino acid
MSNTYDSSSIKVLKGLDAVRKRPGMYIGDTDDGTGLHHMVFEVVDNAIDEALAGYCDEIIVTIHSDNSVSVRDDGRGIPTGIHEEEGVSAAEVIMTVLHAGGKFDDNSYKVSGGLHGVGVSVVNALSEKLELTIHRDGKIHQQIYRSGVPDDRLKVIGETDKSGTFVRFWPSLDTFKGETEFQYDILAKRLRELSFLNSGVSIRLIDKRDNREDHFHYEGGIKAFVEYLSRNKTPIHQNVFYFSTEKDGIGVEVAMLWNDGFQENVYCFTNNIPQRDGGTHLVGFRTAMTRTLNNYMDKEGFNKKSKISATGDDAREGLIAVISVKVPDPKFSSQTKDKLVSSEVKTAVETLMNEKLVEYLLENPTDAKIVVGKIIDAARAREAARKAREMTRRKGALDLGGLPGKLADCSERDPAFSELYLVEGDSAGGSAKQGRNRKTQAILPLKGKILNVEKARFDKMLAXQEVATLITALGCGIGRDEYNPDKLRYHSIIIMTDADVDGSHIRTLLLTFFYRQMPEIIERGHIFIAQPPLYKVKKGKQEQYIKDDDAMDEYLMSIALDGAALYVSEHAPAMHGAQLEKLVVDYHAAHKIIRRMERLYPLSMLNSLVYHSTLTEDDLSDKAKVEEWMSGLVNRLNNAEEQSSTYSYTITQNEENRLFEPVLRIRTYGIDTDYKLDYDFIHSSEYQRITNLGDIIGNLIEEGAYIERGERRQAISSFEEALEWLTKESRRGLAVQRYKGLGEMNPEQLWETTMNPDTRRMMQVTVKDAIATDELFTTLMGDAVEPRRAFIEENALKAENIDI

SEQ ID NO: 6905 - DNA, 2037 bp, Serratia marcescens
  misc_feature (1683)..(1683): n is a, c, g or t
atggttcgttcttttttaatagcattgatgttgatgctattttcattatcttcattagccgccgatacaggttggctaactatgccagacaatgatcatgctcaggttagggctacggctgacaagtcatcgacaggcgatgttaaaatattgcttgaggtgcaattagcgccgggctggaaaacatattggcgctctcccggagaaggtggcgtagcacctgaaattaattggacgcaatctgtgtctgatatgatatggcattggccatcaccttccgcttttgatgtcgcaggtattcatacccaaggttacgataaagaagtcgtcttccccattgaactaaaatctgtcgatagcgataacttaaatggggtattaacactttcaacctgtagtaatgtctgtattttaactgattactcattaaatctggatttaaacgagcctgctcccgctgattttgaatggcaatataatcaagccatggccaaagtacctgtgacaagtggattaatttctgctgtttcatctgattatcgaaatagtcaattaaccctctcattacaacgagaacaaggtgactggcatcaacctaatatttatctcgatccaccacaaggaatgctatatggcattccacagttaacagcaaaaggtgatcatttatctgttactgtcgatgtaaccgatgattggggagacgctgcaggtgacattgtaggaaaaccactctcctttgttgtgactgacgatggctattcacgtcaagtcaatgacactataggccaaggcgatagcgtatctctgcctactgctgactcgggggttggattatggagtattttagcctttgcgctgttagggggcttaattcttaatttaatgccttgtgtgttacctgttttggcaatgaaattgggctcaattcttcatatcgaaaaacgtgatacaggggctattcgtaaacagttttctgtttctgttgtgggaattttagtgtcattctgggccttagcgctgtttatgaccgtattacgctacagccaagaagcaataggttggggcatacagtttcaaagcccttggtttattggctttatggtgctgatcacggctatttttaccgctaatttatttggcctatttgaattacgtttatcaagtaatatgaataccaaaatagcgacagcaggaggccaaggttatagtcgacatttctgggaaggggcttttgctacattgcttgccacaccgtgttctgccccattcttggggactgcggttgcttatgcattgatagcaccattaagtgagttatggttaattttcaccgcattaggtcttggaatgagtttaccatggatcatggttgctatgtttccatcaattgccaaagtgttgccaaaacccggtaaatggatgaatcgcctaagagttgttttaggctttatgatgttgctatcttgtatttggctgatcactttattgatcccccattttggtattggcattgttgcggctatttttgtggctatcgccctgatcttgctttttgctattgctaaacattacggcaaaaaaacgctatttgcttcaatggtgatcacccttattttaggtggtacaagctatctatttattgctcagcctgatactcagaccttggcggggcaagatcangtgaattggcaaccactctcagaagaggctatccatcaagcgttagctgaaaataaacgggtgtttattgatgttactgcagattggtgtgttacctgcaaagcaaataaatacaatgtattattacgcgatgatgtgcaaaaggcactttcagagcctgatgttgtcgcattaagaggggattggacgaaaccgtcagaacagatcacccaatttttaaaacagcgcggtcaagtcgccgtgccgtttaaccagatttatggaccatgtaacaaggagggggagatcctaccgcctcttttaaataaagatctaatgttaactattctttcagaggctaaaggagcccaataa

SEQ ID NO: 6906 - protein, 678 aa, Serratia marcescens
  misc_feature (561)..(561): Xaa can be any naturally occurring amino acid
MVRSFLIALMLMLFSLSSLAADTGWLTMPDNDHAQVRATADKSSTGDVKILLEVQLAPGWKTYWRSPGEGGVAPEINWTQSVSDMIWHWPSPSAFDVAGIHTQGYDKEVVFPIELKSVDSDNLNGVLTLSTCSNVCILTDYSLNLDLNEPAPADFEWQYNQAMAKVPVTSGLISAVSSDYRNSQLTLSLQREQGDWHQPNIYLDPPQGMLYGIPQLTAKGDHLSVTVDVTDDWGDAAGDIVGKPLSFVVTDDGYSRQVNDTIGQGDSVSLPTADSGVGLWSILAFALLGGLILNLMPCVLPVLAMKLGSILHIEKRDTGAIRKQFSVSVVGILVSFWALALFMTVLRYSQEAIGWGIQFQSPWFIGFMVLITAIFTANLFGLFELRLSSNMNTKIATAGGQGYSRHFWEGAFATLLATPCSAPFLGTAVAYALIAPLSELWLIFTALGLGMSLPWIMVAMFPSIAKVLPKPGKWMNRLRVVLGFMMLLSCIWLITLLIPHFGIGIVAAIFVAIALILLFAIAKHYGKKTLFASMVITLILGGTSYLFIAQPDTQTLAGQDXVNWQPLSEEAIHQALAENKRVFIDVTADWCVTCKANKYNVLLRDDVQKALSEPDVVALRGDWTKPSEQITQFLKQRGQVAVPFNQIYGPCNKEGEILPPLLNKDLMLTILSEAKGAQ

SEQ ID NO: 6907 - DNA, 1167 bp, Proteus mirabilis
  misc_feature (162)..(162): n is a, c, g or t
ttgtcaggccaatcatctataaaacagcgtccgttagttatcggccttgtggctggtgaaacgtccggtgatatcttgggcgcgggattaatccgcgctcttaaacaaatgcatcccaatattcgttttgttggtgtcgcaggtcctttgatgcaagcaganggttgtgaagcttggtatgaaatggaagagcttgcggtgatggggatcgtggaagtacttgaacgtttgccacgattattgaagatcagaaaagatctcactcaacgctttacacaacttaagccagatgtttttgttggtattgatgctcctgattttaatatcacccttgaaggtcgcttaaaacaaaaagggttgaaaactatccattatgtcagtccatcagtatgggcttggcgtcaaaaacgggtttttaaaattggtaaagcaacggatttggttttagctttccttccttttgaaaaagcgttttacgataaatatcaggttccttgtcgctttatcggtcatacaatggctgatgcaattgcgttacaccctgataaaaaagcggctcgtgaacacctaggtattgatcaagaggcaatctgtttagctctgctaccaggaagtcggcattctgaagtggaaatgctcagtgcggactttataaaaacagcgcagcgattaaagcaacagatccccgcattacatattgttgtccctttggtaaatgcgaagcgacgggcacaatttgaacaaatacatcaaagtgttgccccaaaacttgaaatccaactcttagatggacaagcaagagaggcgatgaccgccagtgatgcgactttattagcatctggtacagccgccttagaatgcatgttaacgaaatgcccgatggtagtgggttatcgtatgaaaccatttaccttttggttagcaaaaaaattagttaaaacgccctatgtctctttacccaatttattagcaggacgggaaataattaaagagttgctgcaagaagagtgcacaccagaagcactggcagaacaattactccccctattaacggatgcggaaaaagcacaacacttaaaagagatatttttacaattacactcagctatccgttgtcgtgctgatgagcaagcagcgaatgcagttttagaattagcaggtcaataa

SEQ ID NO: 6908 - protein, 388 aa, Proteus mirabilis
  misc_feature (54)..(54): Xaa can be any naturally occurring amino acid
MSGQSSIKQRPLVIGLVAGETSGDILGAGLIRALKQMHPNIRFVGVAGPLMQAXGCEAWYEMEELAVMGIVEVLERLPRLLKIRKDLTQRFTQLKPDVFVGIDAPDFNITLEGRLKQKGLKTIHYVSPSVWAWRQKRVFKIGKATDLVLAFLPFEKAFYDKYQVPCRFIGHTMADAIALHPDKKAAREHLGIDQEAICLALLPGSRHSEVEMLSADFIKTAQRLKQQIPALHIVVPLVNAKRRAQFEQIHQSVAPKLEIQLLDGQAREAMTASDATLLASGTAALECMLTKCPMVVGYRMKPFTFWLAKKLVKTPYVSLPNLLAGREIIKELLQEECTPEALAEQLLPLLTDAEKAQHLKEIFLQLHSAIRCRADEQAANAVLELAGQ

SEQ ID NO: 6909 - DNA, 1716 bp, Proteus mirabilis
  misc_feature (1308)..(1308): n is a, c, g or t
atgcgtactagccactatttgctctctactttgaaagagacgcctgctgatgccgaaattgtcagccatcaactcatgcttcgcgcaggtatgatccgtaaactcgcatctggtctttatgattggatgccgaccggtgttcgtgtcctgagaaaaattgagaaaattgttcgtgaagagatggacaacgcaggctcacttgaaatttcaatgccggttgttcagcctgctgatctatggcaagaaagtggccgttgggaacaatatggcccagaattgttgcgttttatagatcgcggtgagcgtccttttgttttaggtccaacccatgaagaagtggtgaccgatattgttcgtaatgaaatcacctcttacaaacaactaccactcaacctttaccaaattcaaactaaattccgtgatgaagtacgcccgcgctttggtgttatgcgttcacgtgagtttatcatgaaagatgcctattcattccatatctctcaagagtctctacaagagacttacgacagaatgtatcaagcctatagcaatatctttactcgtattggtttagacttccgtccagtattggctgatacaggctctattggtggtagtgcctctcatgaattccaagtattagcagatagcggagaagatgatatcgtattctcaacagcatctgactatgctgctaatattgaattagcagaagcggttatgccagcaacacctcgttcaccagcaacagaagagttacgtttagtagatacaccaaacgcaaaaactattgctgaattagttgaacaatttaatctgcctattgaaaaaacagttaaaacacttattgttcatgcaactgaagaaagtggtcataaattagtggctttattagtccgtggtgatcatgagctcaatgaaataaaagcagaaaaatgtagcattgtcgcttcacctttagttttcgcgactgaagaagagatccgccaagctgttaatgcaggtccaggctctcttggtccaattaacttgccattaccaatcattatcgatcgcgctgtatctgttatgagcgattttggtgctggtgcaaatattgatggtaaacactactttggtattaactgggagcgtgatttacctcttgctgaaatggcggatatccgtaatgttgtcgaaggtgatccaagcccagatggtaaaggtactttacttatcaaacgtggtattgaagtcggtcatatcttccaactaggtaagaaatattctgaagcattaaaagcgacggtacaaaacgaagaaggccataancaagttgtgactatgggttgttatggtattggtattactcgtatcgttgcagcggcaatcgaacaaaaccatgatgcccgtggtattatctggcctgatgctatcgcacctttccaagttgccattttaccaatgaacatgcatcgttcttatcgtgtaaaagaagtagcagagaaactctatgctgacttacgtgcacagggtattgatgtattatttgatgatcgcaaagagcgcccaggtgtgatgtttgcagatatggaactgattggtgtaccacacaccatcgtgattggtgatcgtaatctggataacgaacaagttgagtataaagcacgccgtagtgatgataaatcgctggtcaatgtgaatgatgttgttgcctttattaaagagcaactggtttaa

SEQ ID NO: 6910 - protein, 571 aa, Proteus mirabilis
  misc_feature (436)..(436): Xaa can be any naturally occurring amino acid
MRTSHYLLSTLKETPADAEIVSHQLMLRAGMIRKLASGLYDWMPTGVRVLRKIEKIVREEMDNAGSLEISMPVVQPADLWQESGRWEQYGPELLRFIDRGERPFVLGPTHEEVVTDIVRNEITSYKQLPLNLYQIQTKFRDEVRPRFGVMRSREFIMKDAYSFHISQESLQETYDRMYQAYSNIFTRIGLDFRPVLADTGSIGGSASHEFQVLADSGEDDIVFSTASDYAANIELAEAVMPATPRSPATEELRLVDTPNAKTIAELVEQFNLPIEKTVKTLIVHATEESGHKLVALLVRGDHELNEIKAEKCSIVASPLVFATEEEIRQAVNAGPGSLGPINLPLPIIIDRAVSVMSDFGAGANIDGKHYFGINWERDLPLAEMADIRNVVEGDPSPDGKGTLLIKRGIEVGHIFQLGKKYSEALKATVQNEEGHXQVVTMGCYGIGITRIVAAAIEQNHDARGIIWPDAIAPFQVAILPMNMHRSYRVKEVAEKLYADLRAQGIDVLFDDRKERPGVMFADMELIGVPHTIVIGDRNLDNEQVEYKARRSDDKSLVNVNDVVAFIKEQLV

SEQ ID NO: 6911 - DNA, 1464 bp, Proteus mirabilis
  misc_feature (1451)..(1451): n is a, c, g or t
atgaatcaacagcgtgtattggtattaggtgccagtggacatattggacaaaatcttattcctgccttaatagcacaaggccatcaagtcaccgccggtgctcgtagagtcgattggatgatgtcgcaagggtggcaaaatacacgctgtgtatttgttgatttacacgatcccaaaacattacgagatgtcatccgtaatacggatattgtgtattaccttgtacacagtatgggagatgcccataaccttatcgaacaagagcgccaagcggcattgaacgtcgtcgatgctttagaagagagtgacgttaaacaaattatttttttaagtgcgctccaacataaagatcaaccctactctccccatcttgttgcccgcaagctcacgggagaagtacttagaaccagctctattcctgtgacggaaatccgcacctctatgattgtcggtcccggctcggccgcttttgagatcatgcgagatatggtatataacttaccgatattaaccccgccgcgttgggtgcgttcaaaatcatcccctattgcgttaaaaaatttaatttactatttaacagaaattattcatcacccaacccatcaacaccgcatttttgatgccggtggccctgaatatattagctatcaaacactttttgagcgctttattaacatctccggcaaaaaacgattactgatccctttgccgatccccgccagtattatttctgctgggtttattagcctaataacttcagtacccacttcaatcgccaaggagcttatccaagggcttaaatacgatcttcccgctaaagatgcctctttacgcaaactgatcccacaaaagttaatttcttttgatgacgcagtcagagaaacactcgcagatgaagaagcggctttagatgatcaagattggggttactctcctgaagtacgtaaccgttggaaacccggctatggctattatcccaaaaatgccggatgtacagtgtcaacaccagcgagtgcggcgacactttggcatgtcgttcagcaaattggtggtgaacaaggttatttttatggtaatgcattatggaaaacacgtgctttattagatgatcttgttggcaacaaagtcacttatgggcgccctcagcgtgaaacgctagcgctaggtgatatgattgatggttggcgggtaataaagttagagcctgaaaaacaactgactttactcttcggtatgaaagcccccggtttaggacgcctctcttttactattcacgatagtggtaacctacgctcattagatgtccgtgcttggtggcatcctgctggttttagtggtttactctattggtttgccatgatgccagcccatttatttatttttaaaggtatggctcaaaccatctcaacttgcgcctatagattggataaaaattcacctaaaaagcccgngcaatcgtcctaa

SEQ ID NO: 6912 - protein, 487 aa, Proteus mirabilis
  misc_feature (484)..(484): Xaa can be any naturally occurring amino acid
MNQQRVLVLGASGHIGQNLIPALIAQGHQVTAGARRVDWMMSQGWQNTRCVFVDLHDPKTLRDVIRNTDIVYYLVHSMGDAHNLIEQERQAALNVVDALEESDVKQIIFLSALQHKDQPYSPHLVARKLTGEVLRTSSIPVTEIRTSMIVGPGSAAFEIMRDMVYNLPILTPPRWVRSKSSPIALKNLIYYLTEIIHHPTHQHRIFDAGGPEYISYQTLFERFINISGKKRLLIPLPIPASIISAGFISLITSVPTSIAKELIQGLKYDLPAKDASLRKLIPQKLISFDDAVRETLADEEAALDDQDWGYSPEVRNRWKPGYGYYPKNAGCTVSTPASAATLWHVVQQIGGEQGYFYGNALWKTRALLDDLVGNKVTYGRPQRETLALGDMIDGWRVIKLEPEKQLTLLFGMKAPGLGRLSFTIHDSGNLRSLDVRAWWHPAGFSGLLYWFAMMPAHLFIFKGMAQTISTCAYRLDKNSPKKPXQSS

SEQ ID NO: 6913 - DNA, 669 bp, Serratia marcescens
  misc_feature (239)..(239): n is a, c, g or t
atgtgggattatattgttgatattttaccaggcttaccgaccagtttatcactgacttttgttgcgctcttagtcgcctttacgttatcggtattaatgacttttattttggcattaaaagtccctgttatttcacctatcgtaaaagtctatattacattgtttactggcacacctttgttagtacaatttttcttaatctattatggacccggacaattcccctcattaaaagaatntcctctgttgtgggaattattatccacaccttggttttgcgccatggtgacattagcattaaatagtgcggcttattcaacactccttttccacggtgcagtcagggcgatacctgctggacaatggcaatcctgccaagctttaggtatgtcaccgctacaaacagcgaatgtcatcttaccttatgctttcaaacgcgccctttcttcttattccaatgaagtggtgctgattttcaagagtacttctcttgctagcactatcactttacttgagctaaccggctatagccgacaagtctttgggcaaaattatgatgtgatggtatttgttgctgcaggcattatttatttagctatcaatggaatactgacactgttaatgagattaattgagaagaaagccttagcttttgaacatcgtgattag

SEQ ID NO: 6914 - protein, 222 aa, Serratia marcescens
  misc_feature (80)..(80): Xaa can be any naturally occurring amino acid
MWDYIVDILPGLPTSLSLTFVALLVAFTLSVLMTFILALKVPVISPIVKVYITLFTGTPLLVQFFLIYYGPGQFPSLKEXPLLWELLSTPWFCAMVTLALNSAAYSTLLFHGAVRAIPAGQWQSCQALGMSPLQTANVILPYAFKRALSSYSNEVVLIFKSTSLASTITLLELTGYSRQVFGQNYDVMVFVAAGIIYLAINGILTLLMRLIEKKALAFEHRD

SEQ ID NO: 6915 - DNA, 1206 bp, Serratia marcescens
  misc_feature (65)..(65): n is a, c, g or t
gtgggatcattcgatacagttattataggtgcaggggccgctggacttttttgtgcctctttagnaggacaagcgggattatctgttttagttttagataatggcaaaaaagccggcagaaaaattttaatgtctggtggtggacgttgcaattttaccaatatgtatatcgagccatcagcttacttatccgataatcctcatttttgtaagtcagcacttgctcgctatacacaatgggattttatcgagttagtacaaaagcaccatattgcttaccacgaaaagacattagggcaattattttgtgatgattctgcccagcaaattgttgatttattactcgcagaatgccatgaaggaaaagtaagtattcgcttacgtagtgaggtgactcaaatagagaaaaccgccgaaggctttactcttttggtaggagggaaaacaataaccgcctcctctgtagtgattgccagcggaggactttcaatgcccggtttaggtgccaccccttttggctataaaattgcgcaacaatttggccttaatgtattgcccactcgtgcaggcttagtcccttttacattacacaagccacaacttgaacaactcagcccgctctctggtgtggcgatccctgctattgtcaccgctgaaaatggcacccaatttaaagagaatattctttttactcatcgtgggctttccggtcctgctattttacaaatctctagttattggcatgcgggagagaatgtgagcattaacttacttcctgacacggatttggaaggctatttacaagaaaaacgacaagcacagccgaatcaattattaaaaaatacactttctcgcctactaccgaagcgttttatagagataatgattgaaaataatcaactgcctgatacctcactggctcaacttagcaatgaacgtattacacaaataacgacgttgctacaagcatggcttgttttacctaatggcacagaaggttatcgcactgcagaagtcaccctaggtggtgttgatacccgtaatctctcctctaaaacgatggaagcaacaaagataacaggtctctattttattggtgaagtggttgatgtcacaggttggttaggaggatataacttccaatgggcatggagctctgcttatgcctgtgcccaagcattgatctctcgacacatgactaagtag

SEQ ID NO: 6916 - protein, 401 aa, Serratia marcescens
  misc_feature (22)..(22): Xaa can be any naturally occurring amino acid
MGSFDTVIIGAGAAGLFCASLXGQAGLSVLVLDNGKKAGRKILMSGGGRCNFTNMYIEPSAYLSDNPHFCKSALARYTQWDFIELVQKHHIAYHEKTLGQLFCDDSAQQIVDLLLAECHEGKVSIRLRSEVTQIEKTAEGFTLLVGGKTITASSVVIASGGLSMPGLGATPFGYKIAQQFGLNVLPTRAGLVPFTLHKPQLEQLSPLSGVAIPAIVTAENGTQFKENILFTHRGLSGPAILQISSYWHAGENVSINLLPDTDLEGYLQEKRQAQPNQLLKNTLSRLLPKRFIEIMIENNQLPDTSLAQLSNERITQITTLLQAWLVLPNGTEGYRTAEVTLGGVDTRNLSSKTMEATKITGLYFIGEVVDVTGWLGGYNFQWAWSSAYACAQALISRHMTK

SEQ ID NO: 6917 - DNA, 1545 bp, Proteus mirabilis
  misc_feature (662)..(662): n is a, c, g or t
atgatctgcgcattgatggcctctttttctagtttcgccaattgcttatcaataacagaaaataaagaaatatcaggccaatttaatcacgataaggcactctgttttactacacatttacagagccagcgctatgctgagttagatgttaaaggtatacaaaatctgcaattagcaaaccaagatggcactcatattcgtcgcttattaaaagatgtgcccgttgatggacaacaacaaaagatacgcttcctattacctgaaacggcaaattatcagtttattgcccaaggagaagttggggtacagtggcatatcacactgaaaacatacccttatcagcctttagataaagatgcgggtatagcattaactagccctagattgcaaatgctggcacaagatctcaccgccagcaatatacagttattctggcaacagatacagcaagagggaactccccttgttgaaccttacgataatcataacaagcgcgtgacttttttatggcaaggtgcgcaatctaatgtatatctattgggatcgcctgcaggtgatcatgatccgttaacgcgtttagccaatagcgatatttggtatcgtagttatatcgtgcctaacgatacattaatgcaatataaattagcaccagatgtgccagncattgaaaatgcaacagctgcacagcagcgccgtgctattttaacgacggcacaggccgatccttttaatcttcacccttcaccaagtaaagcggacgatcgttataattacttttcattgctgtcacttgattatccccgtgaatgccagttgccagatatcttagataggacaatgaatggcaatacatcaatcagtcgttttcatagtgaaattttaaacaatgatcgagagattgcgctttatttacccgcacagaaaatgacgacaccgcgactattggtgctatttgatggacaaatttatcgccaacaatatggcatagaccggttttttgataagttgattgaagaggggaaattacctcctattgctatcttatttgtcgatagtattgatagtgatcgtcgtagtgttgaattaccacctaatcctgattttcaccgctttttagcggatgaacttttggtttggttagagcaagagaaaggcctgcaagtagccgctaaggaaactatagtctcaggctcaagctatgggggattggcctctgcatgggtggcatttaaccgtcctgatcgctttgggaaagtgcttagtatgtccggctcttattggtgggcgccagaaaacgaagccccagagtggttaattcgccaatatcaacaggcggataaaaaaccattacagtttttcttagaggctgggttatttgagtctcgcgaaggcgctggaggaatattaaataataatcgccaattaaagcaggttttacagcaaaggggctatcctgtgcaatcgctcgagatggcgagcgggcatgattatatctcttggtgtgaggcgctttatatcggcactaaagcgttaactaacgattaa

SEQ ID NO: 6918 - protein, 514 aa, Proteus mirabilis
  misc_feature (221)..(221): Xaa can be any naturally occurring amino acid
MICALMASFSSFANCLSITENKEISGQFNHDKALCFTTHLQSQRYAELDVKGIQNLQLANQDGTHIRRLLKDVPVDGQQQKIRFLLPETANYQFIAQGEVGVQWHITLKTYPYQPLDKDAGIALTSPRLQMLAQDLTASNIQLFWQQIQQEGTPLVEPYDNHNKRVTFLWQGAQSNVYLLGSPAGDHDPLTRLANSDIWYRSYIVPNDTLMQYKLAPDVPXIENATAAQQRRAILTTAQADPFNLHPSPSKADDRYNYFSLLSLDYPRECQLPDILDRTMNGNTSISRFHSEILNNDREIALYLPAQKMTTPRLLVLFDGQIYRQQYGIDRFFDKLIEEGKLPPIAILFVDSIDSDRRSVELPPNPDFHRFLADELLVWLEQEKGLQVAAKETIVSGSSYGGLASAWVAFNRPDRFGKVLSMSGSYWWAPENEAPEWLIRQYQQADKKPLQFFLEAGLFESREGAGGILNNNRQLKQVLQQRGYPVQSLEMASGHDYISWCEALYIGTKALTND

SEQ ID NO: 6919 - DNA, 1536 bp, Morganella morganii
  misc_feature (4)..(13): n is a, c, g, or t
  misc_feature (943)..(943): n is a, c, g or t
atgnnnnnnnnnngtatttgggtgattagccctaatgagccttcaaataagcaagcctattttgtccatgcaccttatcaagtggataaaattactgcgaagcaattagcttcatggcaggaattagccagcgacatctcattgtcattaccgacactaaacccttatattcctgataatctgtcacttattgatgctgatagtaacatcactaagcctcaactattatggcaagacagtcatgctcggttattctatatgccatcgcactatttttctgatgagccgaaagccagtgtgacgttaagtttagtgaataaaaatgcagatcgtacagttaaacagcaagttatacaaacattgaccaattaccttgctgatctaacctctagtgaactggcttatcaagcttctgttgccggcatgaatatctcctcttcttctgggcgtggagtcgatttctcagtcaatggttatactcaacatttaccagagctagtaaatgccacactaaaaagctatataacgtttgaagccactcagcaagagcttgatcaagctaaatcttggtatcgtgaacaactggaggtgacgcataaccttaaagcgtatgatgctgcaatgttacctgcccgtcgcttaaatacgatcccttattatgaagaagccgataaacttaaggcgttagagtcgataacgttacaagatattaaagataatcgtcgtgatgtcattgaaaatgcagcgcttcaagcattaattatcggtaatttaacgccagagcagagccgtgagatagttaaatcggcacaggcattattaggcaataaaggaacagaatattggattggcgacacattagtttttgataaattaaatcaagttacattccaaaataaatctaaaagcaccgataatgcgctaggtgaattgtttatccctnttggttatgagcgtctacaaggaaaagcgattacatcagtattatcctctatcgtgcatccttggttctttgaacaactcagaacagaagagcaattaggttatgcggtctttgctttccaagcttcaatgggcgagcagtccggtttaggctttttactgcaaagtaatgcaaaaccacctgtttatctcaatgagcgttatcatgcattttatcaacaagcttatgatcgcttgaaaaagctaagtgaagctgaatttaatcaatataaaaaagccattattgatgaagtaaaacaaccaccgcaaacattttatgaagaggtttctctttatcgtaatgatttttatcgtaataacttaaaatatgatggtcgtgagaagtttttagcccaactgaataaggtaacgctaaaacaagcgatcgaattttatgaaaaagcgataattaaaccgacaggactcgtgtttgtttcacaaataatcgggaaagagggtaacaacgctgattatgcgcaaaataaacagtggaaaatctattcaaccgtgagtgaattacaaaaaacattacctgttgaggaaattaaagagtga

SEQ ID NO: 6920 - protein, 511 aa, Morganella morganii
  misc_feature (2)..(5): Xaa can be any naturally occurring amino acid
  misc_feature (315)..(315): Xaa can be any naturally occurring amino acid
MXXXXIWVISPNEPSNKQAYFVHAPYQVDKITAKQLASWQELASDISLSLPTLNPYIPDNLSLIDADSNITKPQLLWQDSHARLFYMPSHYFSDEPKASVTLSLVNKNADRTVKQQVIQTLTNYLADLTSSELAYQASVAGMNISSSSGRGVDFSVNGYTQHLPELVNATLKSYITFEATQQELDQAKSWYREQLEVTHNLKAYDAAMLPARRLNTIPYYEEADKLKALESITLQDIKDNRRDVIENAALQALIIGNLTPEQSREIVKSAQALLGNKGTEYWIGDTLVFDKLNQVTFQNKSKSTDNALGELFIPXGYERLQGKAITSVLSSIVHPWFFEQLRTEEQLGYAVFAFQASMGEQSGLGFLLQSNAKPPVYLNERYHAFYQQAYDRLKKLSEAEFNQYKKAIIDEVKQPPQTFYEEVSLYRNDFYRNNLKYDGREKFLAQLNKVTLKQAIEFYEKAIIKPTGLVFVSQIIGKEGNNADYAQNKQWKIYSTVSELQKTLPVEEIKE

SEQ ID NO: 6921 - DNA, 480 bp, Serratia marcescens
  misc_feature (247)..(247): n is a, c, g or t
atgacaggcaatcattattcccactctaaacatttagggagtagcttattcgaggtgcttattgttatggctatagtagcaatattgagcgctttatctttgaactcatatcatcagttgttacgccaacgccagttagttcaaagtgtaagagaagtgatggcgtttttagcttatcaacaacaacgctcactgctctttaattgcaaagtgcaaattgtattgtggctatcacccatcaataaantagaggcaaaatcgttaacaacacccacaaccaaagaaagtattcaattagggttaagcaatcagcttattcgctctacagcaacacgctttacattttgtggcttacgccaaacgttacgaccgatgcattttgtgctgtcaaatggtgatgaagaggtcaaaattattatctcttcattagggcgtattcgagcgtgcagtcagacaataaaggcattttcagtatgctaa

SEQ ID NO: 6922 - protein, 159 aa, Serratia marcescens
  misc_feature (83)..(83): Xaa can be any naturally occurring amino acid
MTGNHYSHSKHLGSSLFEVLIVMAIVAILSALSLNSYHQLLRQRQLVQSVREVMAFLAYQQQRSLLFNCKVQIVLWLSPINKXEAKSLTTPTTKESIQLGLSNQLIRSTATRFTFCGLRQTLRPMHFVLSNGDEEVKIIISSLGRIRACSQTIKAFSVC

SEQ ID NO: 6923 - DNA, 759 bp, Proteus mirabilis
  misc_feature (443)..(443): n is a, c, g or t
atgaagcaaaagaaagtaaagaaagcaggtttacgcaaaggcgggtttacatttaaacaattttttgtcgctcatgataagtgtgaaatgaaagtgggtactgatggcgttttattaggtgcttgggcgcctatcactaaagcaaaaacggtgctcgatattggtacaggaagtggattaattgccttgatgttagcgcaacgtgccccgcaggttgagcgtattgatggtattgaacttgatgaagatgccgcattacaggcgcgtgaaaatgcgcaacaatcacagtggagttcgttaatccatatttatcatcatgatatttatcaatatgcgcaacaagcgccaactcgctatgatcttattgtgagtaatccaccctattttgagccagcggttgcatgccgtaaccaagagcgcgagcaagcccgttatacgaaaanattgacccatgaaggtttgcttgataatgcacaacagcttattacagatgaaggcctattttgtgtggtgttaccctatttaatcggtgaacagtttattgaaatctcacaaagaaaagggtggaatgtcgtacagcgagttaatattaaagatagtgcagataagccttaccatcgcatattgctagcctttcaaagacagtatcaaggcgaaactaaaccatgtaatattgaagagctgattatccgcaataatgacggtcattacacaacccagttccaatcttgggtcactgatttttatttatattattaa

SEQ ID NO: 6924 - protein, 252 aa, Proteus mirabilis
  misc_feature (148)..(148): Xaa can be any naturally occurring amino acid
MKQKKVKKAGLRKGGFTFKQFFVAHDKCEMKVGTDGVLLGAWAPITKAKTVLDIGTGSGLIALMLAQRAPQVERIDGIELDEDAALQARENAQQSQWSSLIHIYHHDIYQYAQQAPTRYDLIVSNPPYFEPAVACRNQEREQARYTKXLTHEGLLDNAQQLITDEGLFCVVLPYLIGEQFIEISQRKGWNVVQRVNIKDSADKPYHRILLAFQRQYQGETKPCNIEELIIRNNDGHYTTQFQSWVTDFYLYY

SEQ ID NO: 6925 - DNA, 3132 bp, Proteus mirabilis
  misc_feature (2206)..(2206): n is a, c, g or t
atgagcgaaaaaatccccgctacaggtggtgggccatctcgtttatttattttacgtccagtggcaacaacgctgtttatggtcgcgattttattagcaggaattgtcggttatcgtatgctgccagtgtcggcattacctgaagttgattatccgaccattcaagtcgtcacactctatcctggggcaaaccccgaggtgatgacctctgcggtaacagcaccgttagagcgtcaatttggacagatgtcaggcttaaaacagatgtcctcacaaagttcaggtggggcatcagtcattacattgatgttccaactcacattaccgttagatgtcgcagagcaagaagtacaagcggccattaatgcagcaactaacttattacctactgatttaccttatccgcccatttacagcaaagtaaatccggctgatccgccagtgctaaccttagccgtcaccagttctgtattgccgatgacacagctacaggatatggtagaaacgcgaatatcgcagaaaatatcgcaagttaacggcgttggtttagtctctttagccggcggacaacgccctgctgtgcgcgtaaaattgaatgcccaagcagccgcctcttatgggttagatagtgaaacaatccgcgtggctattaataatgccaatgttaactctgccaaaggtagccttgatggccccactcgctcggtaacgttatccgccaacgatcaaatgaaatcattagatgattatcgcaaactgattgttagctataaaaatggcgcccccatccgccttgccgatattgccaccattgaacaagccccagaaaataaccagcttggtgcttgggccaataatcaacaagccattattatcaatgtgcaacgccaaccgggtgttaatgttattgaaacaacagataatattcgtaatttattaccggatttagtgtctaatttgcctaagtcggtaaatgttgagatcttaaccgatagaaccacgaccattcgggcatcagtgaaagatgtccagtttgaactgggactggcgattgcacttgtggtcatggttatctatctatttttacgtaatggtgttgccactcttattcctagcattgccgtccccctctccttagtgggtacttttgcggtgatgtatttttgcggtttttctgtcaataacctcaccttaatggcacttaccattgcgacaggctttgtggttgatgacgccattgtggtgatagaaaatatctcccgttatctagagcgaggagataagccgttaaccgcagctttaaaaggggcgggagaaatcggctttactattatctcactgactttttctttaattgccgtactgatccctctgttatttatgggagatattgttggtcgtttatttagagagtttgccattaccttagccgtggcgattttaatttccgcggtagtctctttaaccttaacgccgatgatgtgcgcacgcttacttaaaccagaaagtcaaattaagcacaatcgttttgaaatggcttgtgagcgcttttttgaaaagatgatcgccgtgtatgcggtttggttaaaacgtgtattaaatcatcaatggataacattaggcgttgccctcagtacattagcactaacagttttgctctatctatttatccctaaaggctttttccctttacaagataatgggttactacaaggtacaatagaaacctcacaatccatctcttatcaagcgatggttgaaaaacaacaacaagtggttgagaaactgattgacgatccggccgttgagaatattgcgagttttgtgggtatcgatggcagtaatgccaccctcaatacaggtcgcttgcaaattaccttaaaacccctcgatcaacgtgattcacgcattgatgaaattattcctcgtttacaagcacgagtcgcatctattgcaggtattacactctatttacaacccacacaagacttaactattgatacacaagtttcccgtactcaatatcaatttaccttgcaagcaacctcgctcgatgagcttgcctattgggtgcctaaattatcacaggcactacaagagagtccggaacttaccgacatcagcagtgattggcaagctgatgggatgatggcctatatcaatgtagatagagattcagccagtcgcttagggatctcaatgagtnccattgataatgcgctgtataatgcctttggacagcgacttatttcaacgatttacacccaagcaaatcagtatcgtgttgtcttagaacagaatatgcacaatagtgaaggactacaggcactttctgcagttcatttaaccggcaaagagggtgctatggtgccactcttatctattgcctctgtggagcaacgtctcgcgcctttatctatcaatcaccaagagcaatttcctgctaccacattctcatttaatgtcgctaaagacgcatctcttgaagccgctgttaatgccgttaagcaagcagaagagcaaattgcgatgccaaaagatattacgacacagtttcaaggggctacattagcctttgaaagcgccctttccagcacgctgtggcttatcattgcggccatcgttgctatgtatattgtattaggcgtgttatacgaaagttttattcacccaattactattttatctaccctacctactgcgggtgtcggtgctttattggcactgatggcagccggtaatgagctagatattattgcgattattggcatcattttgttgattggtattgttaagaaaaatgccatcatgatgatcgatttcgcactggccgctgaaagagaacaaggactatctccttacgaagcaatttatcaagcttgtctgctacgttttcgccctattttaatgaccactatggctgcgttattaggtgcattacctttaatgctaagcactggcgtaggggctgaattacgccaaccattaggtgtatgtatggtggggggcttaattatgagtcaaatactcaccttatttaccacccctgttatctatttgctgtttgataagttatcactttaccttaatcgccataaacgcgttgaacatgataatggagcggtgtcatga

SEQ ID NO: 6926 - protein, 1043 aa, Proteus mirabilis
  misc_feature (736)..(736): Xaa can be any naturally occurring amino acid
MSEKIPATGGGPSRLFILRPVATTLFMVAILLAGIVGYRMLPVSALPEVDYPTIQVVTLYPGANPEVMTSAVTAPLERQFGQMSGLKQMSSQSSGGASVITLMFQLTLPLDVAEQEVQAAINAATNLLPTDLPYPPIYSKVNPADPPVLTLAVTSSVLPMTQLQDMVETRISQKISQVNGVGLVSLAGGQRPAVRVKLNAQAAASYGLDSETIRVAINNANVNSAKGSLDGPTRSVTLSANDQMKSLDDYRKLIVSYKNGAPIRLADIATIEQAPENNQLGAWANNQQAIIINVQRQPGVNVIETTDNIRNLLPDLVSNLPKSVNVEILTDRTTTIRASVKDVQFELGLAIALVVMVIYLFLRNGVATLIPSIAVPLSLVGTFAVMYFCGFSVNNLTLMALTIATGFVVDDAIVVIENISRYLERGDKPLTAALKGAGEIGFTIISLTFSLIAVLIPLLFMGDIVGRLFREFAITLAVAILISAVVSLTLTPMMCARLLKPESQIKHNRFEMACERFFEKMIAVYAVWLKRVLNHQWITLGVALSTLALTVLLYLFIPKGFFPLQDNGLLQGTIETSQSISYQAMVEKQQQVVEKLIDDPAVENIASFVGIDGSNATLNTGRLQITLKPLDQRDSRIDEIIPRLQARVASIAGITLYLQPTQDLTIDTQVSRTQYQFTLQATSLDELAYWVPKLSQALQESPELTDISSDWQADGMMAYINVDRDSASRLGISMSXIDNALYNAFGQRLISTIYTQANQYRVVLEQNMHNSEGLQALSAVHLTGKEGAMVPLLSIASVEQRLAPLSINHQEQFPATTFSFNVAKDASLEAAVNAVKQAEEQIAMPKDITTQFQGATLAFESALSSTLWLIIAAIVAMYIVLGVLYESFIHPITILSTLPTAGVGALLALMAAGNELDIIAIIGIILLIGIVKKNAIMMIDFALAAEREQGLSPYEAIYQACLLRFRPILMTTMAALLGALPLMLSTGVGAELRQPLGVCMVGGLIMSQILTLFTTPVIYLLFDKLSLYLNRHKRVEHDNGAVS

SEQ ID NO: 6927 - DNA, 681 bp, Proteus mirabilis
  misc_feature (94)..(94): n is a, c, g or t
atgacaaacataacgaaacataagatcgctatttttgatttagatgaaacactgttagccggagattctagctgtttatggacaaattacttgngggagaaaaagagagtcactgatcctgcttttttagctttagataaacaaatgatcgctgactattacgcagaaaggctcaatataaatcagtacttacaccaacatttatcttattttaatcagtatggcatcgaagaaataaatcaatgggttactgattttactcataccataatcaagccattgctctatccccaaggcattaataccataaacctataccgacaacaaaatatccccgttatcattatctctgcaactatgtcttttctggtacatgcgattgcaaaacaacttaatgctgatatttctatgggcattgatatgcagataaaaaataatcattatacaggccatattgagggtattcctacctttagagagggtaaagtcactcgactcaatcagtggaaagaacaaaacaacattaataattcttatatttatttctatactgactcagccaacgatctccctttatgctatcaagcaaatgaggttatcaccattaacgccgatgaaagattaagccaaatagcaacagaaaaagaatggcaacagtgctactggcagttaaataaataa

SEQ ID NO: 6928 - protein, 226 aa, Proteus mirabilis
  misc_feature (32)..(32): Xaa can be any naturally occurring amino acid
MTNITKHKIAIFDLDETLLAGDSSCLWTNYLXEKKRVTDPAFLALDKQMIADYYAERLNINQYLHQHLSYFNQYGIEEINQWVTDFTHTIIKPLLYPQGINTINLYRQQNIPVIIISATMSFLVHAIAKQLNADISMGIDMQIKNNHYTGHIEGIPTFREGKVTRLNQWKEQNNINNSYIYFYTDSANDLPLCYQANEVITINADERLSQIATEKEWQQCYWQLNK

SEQ ID NO: 6929 - DNA, 1422 bp, Proteus mirabilis
  misc_feature (923)..(923): n is a, c, g or t
atgcaaaaaggaaatatatgggttgtcgatgatgatagctctattcgctgggtgcttgagcgagctattacacgagaaggccttacatgtaaaaccttcgaacacgctaatgacgtcctcagtgcactcaatagtgaacttcccgatgtattattatcagatattcgtatgcctgatattgatggtttatctctattaaaaagcgttaaagagcaacaccctacgttgccggttattatcatgacagcgcattctgatcttgatgccgcggtaaatgcttatcagcaaggggcatttgattatctccccaagccttttgatattgatgatacacttgcactcattcatcgtgctattacgcactatcgagagcaaaaacaacctaatacaacagaaactaaccttcaatctgtctctgacatgattggcgaagcccctgcgatgcaagaggtttatcgcattattggtcgcctttctcgctcatcaattagtgtgcttatcaatggcgagtcgggtactggtaaagaattagttgcacatgctcttcatcgccatagcccgagagcacaagccccttttattgcactcaatatggcggctattcccaaagacttaattgaatcagaactttttggtcatgaaaaaggggcatttactggtgcatctcaagtacgccaaggccgttttgaacaagcaaatggcggttccctctttcttgatgaaattggcgatatgccactggatattcaaacccgcttattacgcgtcttggctgaaggacaattttatcgtgttggcggttatgcccctgtgaaagtcgatgtgcgtattattgccgcgactcatcaagacttagaaaaacgcgtaatggaaggtgattttcgtgaagatctctaccatcgactcaatgtaatacgtattcnattgcccccactgcgtgatagaacagaagatattccaagcttagcgcgttattttctccaaaaaaccgctcgagagcttggtgttgaaaccaaagtgctccaccagcaaagtttacattgcatgatggaataccactggtcaggtaacgtcagacaattagaaaacgtatgtcgttggttaacggttatgaccgctagccaagagattatgccgcaagatttacctcaagagatccgccaatcagatgagaagagcaaatcgatacctcgagtctcctctcaacattggtcacaacatctttcattatgggcggatgaggtattcagtgaaggcaaagaaaatattcttaatgacgctctaccgcaatttgagcgcaccttactactcagtgcgctttcctatacaaaaggccataaacaagatgctgctcgtttattaggatggggaagaaatacgctgacacgtaaattaaaagagttaggtatagaggagttttaa

SEQ ID NO: 6930 - protein, 473 aa, Proteus mirabilis
  misc_feature (308)..(308): Xaa can be any naturally occurring amino acid
MQKGNIWVVDDDSSIRWVLERAITREGLTCKTFEHANDVLSALNSELPDVLLSDIRMPDIDGLSLLKSVKEQHPTLPVIIMTAHSDLDAAVNAYQQGAFDYLPKPFDIDDTLALIHRAITHYREQKQPNTTETNLQSVSDMIGEAPAMQEVYRIIGRLSRSSISVLINGESGTGKELVAHALHRHSPRAQAPFIALNMAAIPKDLIESELFGHEKGAFTGASQVRQGRFEQANGGSLFLDEIGDMPLDIQTRLLRVLAEGQFYRVGGYAPVKVDVRIIAATHQDLEKRVMEGDFREDLYHRLNVIRIXLPPLRDRTEDIPSLARYFLQKTARELGVETKVLHQQSLHCMMEYHWSGNVRQLENVCRWLTVMTASQEIMPQDLPQEIRQSDEKSKSIPRVSSQHWSQHLSLWADEVFSEGKENILNDALPQFERTLLLSALSYTKGHKQDAARLLGWGRNTLTRKLKELGIEEF

SEQ ID NO: 6931 - DNA, 1068 bp, Morganella morganii
  misc_feature (685)..(685): n is a, c, g or t
atgaagccggtttgtgttcttggtaatggacagttaggtcgaatgttacgtcaagcgggtgagccattaggtattgcggtatatcccgtagggcttgatgctgaacccgaagcggtaccttatcaaaagagtattattaccgcagaaattgaacgttggccggaaaccgcattaaccaatgagttagagcaccatgctaactttattaaccgagatatttttccattactcgcagatcgcttaccacaaaaacaactccttgatgaacttcatttagcgacagcaccttggcaaccattaacttcggctgagcaatggcctgagctatttaatcagctaggggagtttattatcgttaaacgccgtgttggtggttacgacggacgaggtcaatggcggatacacccaggtgacgaacaacaattaccagccgaaatatatggtgaatgtattgtcgaacaaggtattcctttctctggagaagtctctttagttggtgcaagaaatcgtcagggggattgtgttttttatccactcactcacaatcttcatcaagatggcattttacgcatgagtgttgcgctaccaaatcctcccgaggcattacaacaattagcagaggatatgcttagcaagatcctcaataaactaaattatatcggtgtaatggcgatggaatgctttnttgtcggcgataaattactgattaatgaactcgcacctcgcgtccacaacagtggtcactggacacaaaatggtgcttctattagccagtttgaacttcacttacgcgctattcttgatttaccgatgcccaaacctgatgtttgccaatcggcggtaatggttaatcttattggaacggagatcgacaccaaatggctatcattacctttagttcatctacattggtatgaaaaagaagtgcgtccagcccgcaaagtagggcatctcaacttagtacataatcaccatcaagctctgcaaaagaccttaagtgcattaagtcccctgctcgatgaagcctatcaatatccgattaaatgggcgctagaaaaattaagctag

SEQ ID NO: 6932 - protein, 355 aa, Morganella morganii
  misc_feature (229)..(229): Xaa can be any naturally occurring amino acid
MKPVCVLGNGQLGRMLRQAGEPLGIAVYPVGLDAEPEAVPYQKSIITAEIERWPETALTNELEHHANFINRDIFPLLADRLPQKQLLDELHLATAPWQPLTSAEQWPELFNQLGEFIIVKRRVGGYDGRGQWRIHPGDEQQLPAEIYGECIVEQGIPFSGEVSLVGARNRQGDCVFYPLTHNLHQDGILRMSVALPNPPEALQQLAEDMLSKILNKLNYIGVMAMECFXVGDKLLINELAPRVHNSGHWTQNGASISQFELHLRAILDLPMPKPDVCQSAVMVNLIGTEIDTKWLSLPLVHLHWYEKEVRPARKVGHLNLVHNHHQALQKTLSALSPLLDEAYQYPIKWALEKLS

SEQ ID NO: 6933 - DNA, 942 bp, Morganella morganii
  misc_feature (590)..(590): n is a, c, g or t
atgagacgtcgagtcgctaccattacattaaatcctgcttatgatcttgtgggattaagtacccctattgaattgggtgaagttaaccgagtaacaacagcgggatttcatgctgccggtaaaggtatcaatgtagccaaagtattaaaaagccttggtattgatgtcactgttggcggttttttaggtaaagagaatcaagatggctttcaaaaagagtttagtgaagccgggattgctaatcgcttccaaatggttgaaggtcgcacacgtatcaatgtcaaactgactgaacccagcggtaaagtaactgattttaacttttcagggtttgaaatcactaaacaagattggactcgttttgtaaatgacacactcagctgggcgggtcaatttgatatgatttgtgtcagtggaagtgtaccaccaagtattgatttaaatgattttactgcttggatgaagcgactacgtagcgaatgtatgtgccttatttttgatagtagcagagaagcatttgtcgcggggttaaaagcgttaccttggttagtaaaacccaatcatcatgaactagaaatttgggcaggtanacccttacctgagctttctgacgtggtacaagctgcccatgaattacgccagcaaggtattgctcatgttgttatttcgttaggtgaacaaggcgctatgtgggttaacgcctctggtgcgtggatggcaaaaccgcctaaatgtgatgtggtcagcacggtaggtgccggtgactctatggtaggtgggttgatttatggtttgatgatgaggcaaaccagtgaacataccttacgtcttgctacagcaatttcagctcttgccgtcagtcaaactaatgttggaataactgatcgagaacaattggcaagaatgatgaccgaagttgaattaacgccactaaaaatctaa

SEQ ID NO: 6934 - protein, 313 aa, Morganella morganii
  misc_feature (197)..(197): Xaa can be any naturally occurring amino acid
MRRRVATITLNPAYDLVGLSTPIELGEVNRVTTAGFHAAGKGINVAKVLKSLGIDVTVGGFLGKENQDGFQKEFSEAGIANRFQMVEGRTRINVKLTEPSGKVTDFNFSGFEITKQDWTRFVNDTLSWAGQFDMICVSGSVPPSIDLNDFTAWMKRLRSECMCLIFDSSREAFVAGLKALPWLVKPNHHELEIWAGXPLPELSDVVQAAHELRQQGIAHVVISLGEQGAMWVNASGAWMAKPPKCDVVSTVGAGDSMVGGLIYGLMMRQTSEHTLRLATAISALAVSQTNVGITDREQLARMMTEVELTPLKI

SEQ ID NO: 6935 - DNA, 2835 bp, Morganella morganii
  misc_feature (1756)..(1756): n is a, c, g or t
atgtctgctaacagtgtgtttcaacaattatgggataaagcacaatgcacgttttctacaaagctcaacgagcttgccccttttagtgagcgagagcagcaattttttgcctttagcccctttgcaaccgagcatttacgtgtcaatcctcactggttaacggaaatcagacaaacaccacctgttagtgatgagtggcaaaattactcatctcaattaaagcaacaactcactcatgttgataatgaagatgacttgatggccattttacgacagttccgtcatcaacaattagtgcgtattgcctggtcacaatttttccaactctgtgatacaccctgtacactcaagcaattgagtgtactcgcggaaaccttgattagtgtcgccaaagataagctatatcagcaatgttgccaacagtggggaacgccttgtgatagagagggaaaacctcagccattacttattttgggaatgggcaagttaggtggacttgaactgaatttctcttctgatatcgatcttatttttgcctatcctgaaaatggtgtgactcaaggtgggcgacgtgaattagataatgctcagttttttacccgattagggcaaaaactgattaaagtgttagatcaacatacaatggatggttttgtttatcgtgtagatatgcgtttacgtccttttggcgaaagtggccctttagtgatgagctttgccgcgcttgaagattattatcaagagcaaggacgtgattgggagcgctatgcaatggtaaaagcgcgtgttttgggggcagaaaaaaaagagtattgccaaatcttacgccaaatgttgcgccctttcgtttatcgtcgctatatcgattttagtgtgatccaatctcttcgtaatatgaaatcgatgataagtcgtgaagtacgtcgtcgagggatgattgataatataaagcttggggcgggggggatacgtgaaattgaatttattactcaggtttttcaattaattcgtggcggtagagagcctgagctacaaagtcattcactattaacagtgcttaatgtcattactaaattggaattactctctgcacaagaaacatcacagttagcagatagctatcttttcttacgtcgattagaaaatcttcttcaatctattgcggatcaacaaacacaaacgttacctgacaatcttgaagataaggcacgactggcgtttgcgatgggatttgacgattggcaaatgctctatcaacaaattaaccaaaaaatgcaggctgtttccgttatttttacgcaattgattggcgaagatgatgaaaatgaagatgaagaagatgtcagcgaatttaagcgattatggttattagggcgtttacctgatagcgcaacgctttttcatcaagggctaacggcagaagataggcaagctatttgtcaaacactgcaactgtttcgccaagatatcagtaaacgtactatagggcctagagggcgtgacgtgcttgatgcgctaatgcctaaattattggctaaagtgtgtcttcaaccacaagcgttggtgatcttacagcgtatcaccccgttgttattgggcattgtaagtcgaaccacttatctagagttaatgcaagagtctgatgaggtattaacccacgtagtgcgcttatgtgctgcatcaccgatgattgctgaacaattaacacgacatccattattattggatgaattactcgatcctcattccctctatnaaccattaccattaaatgcctatcaggacgaattacgtcaatatttattgcgtgtgccagaagaagatgaagagcaacgtttagaagcattacgccaatttaaacaagcccagctattgcgtattgccgcagaggatattgcaggagtattaccggtgatgaaagtcagcgatcacctaacctatttagcggaagccattatccatgccgttgttcaccaagcatggtcctatatggtgaaacgctatggggaacctgcgcatttagcgcaacgagacggtttaggttttgcggtcgttgggtatggcaaattagggggctgggaattagggtatagttctgatttagatttggtttttttattagattgcccaatgaatattctgacaacgggggcaaaacagattgatgctcgccaattctatttacgtttagcgcagcgtattattcatctatttagcaccagaacctcttccggcgtgttatatgaagtagatgcacgcttacgtccttccggtgaatcaagtatgttggtaagtactattcaagcctttgatgagtatcagaaaaatgaagcttggacttgggagcatcaagcattaattcgtgcaagaatgatttatggcgatgaccaattacagcagatgtttgcacgtactcgccatgaaacattatgtttagcacgtaacgcaactgtactgcagcaggaagtgcgtgagatgcgccaaaaaatggtacagcatttggcacccactcaaagcaatacatttgatttaaaagcctcatcaggggggatcactgatattgagtttatcgcacaatatttggtattgcgcttttcacatcaatatccggctttgacccgttggtctgataatgtgcgaattttggaattaatggcaaaataccaagtgatgagtgaacaagaggctcagttattaactcaagcttatgtcaccttacgtaatgagcttcatcatcttgcattacaaacattacctgcggttgttgatgaacattgttttatcacagaacggcaatgggtattgagtagtaaacaaaaatggttagatgaataa

SEQ ID NO: 6936 - protein, 944 aa, Morganella morganii
  misc_feature (586)..(586): Xaa can be any naturally occurring amino acid
MSANSVFQQLWDKAQCTFSTKLNELAPFSEREQQFFAFSPFATEHLRVNPHWLTEIRQTPPVSDEWQNYSSQLKQQLTHVDNEDDLMAILRQFRHQQLVRIAWSQFFQLCDTPCTLKQLSVLAETLISVAKDKLYQQCCQQWGTPCDREGKPQPLLILGMGKLGGLELNFSSDIDLIFAYPENGVTQGGRRELDNAQFFTRLGQKLIKVLDQHTMDGFVYRVDMRLRPFGESGPLVMSFAALEDYYQEQGRDWERYAMVKARVLGAEKKEYCQILRQMLRPFVYRRYIDFSVIQSLRNMKSMISREVRRRGMIDNIKLGAGGIREIEFITQVFQLIRGGREPELQSHSLLTVLNVITKLELLSAQETSQLADSYLFLRRLENLLQSIADQQTQTLPDNLEDKARLAFAMGFDDWQMLYQQINQKMQAVSVIFTQLIGEDDENEDEEDVSEFKRLWLLGRLPDSATLFHQGLTAEDRQAICQTLQLFRQDISKRTIGPRGRDVLDALMPKLLAKVCLQPQALVILQRITPLLLGIVSRTTYLELMQESDEVLTHVVRLCAASPMIAEQLTRHPLLLDELLDPHSLYXPLPLNAYQDELRQYLLRVPEEDEEQRLEALRQFKQAQLLRIAAEDIAGVLPVMKVSDHLTYLAEAIIHAVVHQAWSYMVKRYGEPAHLAQRDGLGFAVVGYGKLGGWELGYSSDLDLVFLLDCPMNILTTGAKQIDARQFYLRLAQRIIHLFSTRTSSGVLYEVDARLRPSGESSMLVSTIQAFDEYQKNEAWTWEHQALIRARMIYGDDQLQQMFARTRHETLCLARNATVLQQEVREMRQKMVQHLAPTQSNTFDLKASSGGITDIEFIAQYLVLRFSHQYPALTRWSDNVRILELMAKYQVMSEQEAQLLTQAYVTLRNELHHLALQTLPAVVDEHCFITERQWVLSSKQKWLDE

SEQ ID NO: 6937 - DNA, 786 bp, Morganella morganii
  misc_feature (31)..(31): n is a, c, g or t
atggacagaaaattgatgccagcgctatttnttggacatggcagtccaatgaatgtattggaagataataaatatactcgcctctggacgacgttaggagagacactgcctaagcctaaagcaatattagtcatctcagcgcattggtatacgcaagggacttatattacagcgatgactcatcctaaaacaattcatgatttttatggatttccaccagagttataccaaatagaatatcctgcaaaaggctccattggtctcgttgcattaattgaagatctgattgatccgatgaaattaaaactggatatggagcaatggggattcgatcacggtagttggggaatattagagaagatgtaccctaatgctaatattcctgttgttcagttaagtattgatgctaaccaatcgccacagtggcactatcagtttggaaaaaaactggttgaactacgtagagaaggtgtattagtgattggcagtggaaatatcgttcataatttaagaatgatggattggcaaaatgaccaagcagagccttactcttgggcattatcttttagtgaaacagtagagcgctgtttacaaagtgataaagtgcctgaagcgctttttaccattttatcaacgcaagaagggcaactcgcacacccaacagcagaacattttttacctgcattatatctactcggtttaaaacagccggatgaaaaagtaactttattaaataatgatattattaataaatcacttagcatgatgacctttcaaattgggtaa

SEQ ID NO: 6938 - protein, 261 aa, Morganella morganii
  misc_feature (11)..(11): Xaa can be any naturally occurring amino acid
MDRKLMPALFXGHGSPMNVLEDNKYTRLWTTLGETLPKPKAILVISAHWYTQGTYITAMTHPKTIHDFYGFPPELYQIEYPAKGSIGLVALIEDLIDPMKLKLDMEQWGFDHGSWGILEKMYPNANIPVVQLSIDANQSPQWHYQFGKKLVELRREGVLVIGSGNIVHNLRMMDWQNDQAEPYSWALSFSETVERCLQSDKVPEALFTILSTQEGQLAHPTAEHFLPALYLLGLKQPDEKVTLLNNDIINKSLSMMTFQIG

SEQ ID NO: 6939 - DNA, 1896 bp, Proteus mirabilis
  misc_feature (1261)..(1261): n is a, c, g or t
atgactcaatcaagttataatgcaaaggatattgaggttcttaatggtctagagcctgtacgtcggcgtcctggtatgtataccgataccactagaccgaaccatttggcacaggaagtgatagataatagcgtggacgaggcgcttgcggggcatgcaaccaaggtcgaagttatcttatatgcagaccaatctattgaggttatcgacaatgggcgaggaatgccggttgatatccatccagaactgaaagtctctgctattgagctgatccttgcccatcttcatgccggaggaaaattctccaataaaaactaccaatactctggtggcttgcatggtgtcgggatctcagtggttaatgcgttatcaaagcgtattgaagtcaccgtgcgccgagaaggcaaaatatatcaaattgcttttgagaacggtgataaagttgaagagctacatcaaataggtacgtgtgctaaacgagatacaggaaccagtgttcatttctggccggatagcacttactttgatattcctcgtttctcatcaaaaagcttatctcatgtattaaaagccaaagcggtgttgtgcccaggcgtcaatgtctcttttaccgataaagtcaataatacccaagaaacgtggtgttacgctgatggtttaacagactatttaagtgaagctgtcgctgaatttgttcgcttgcctgaagagccatttacagggaaatttgaaggtgataacgaagccgttgaatggtcaatgctttggttgccagaaggaggcgatttactcacagaaagttatgtgaacctcattccaaccgtacaaggtggtacacacgttaatggtttgcgccaaggtgtattagatgccatgcgcgagttttgtgaattccataatttattgccaagaggcattaaattaaccgcagatgatacatgggagcgttgtgcttatgtgttatcagtaaaaatgcaagatcctcaatttgcaggacaaaccaaagagcgtctatcgtcacgtcaaaccagtgcctttgttgctagtgcagtaaaaaatgcatttagtttatggttaaaccaaaacgttcaagtcggtgaattactcgctgaaatggctattagtagtgcgcaacgacgtatgcgtgcggctaaaaaagtggtgagaaaaaaactgacttcggggcctgcattgccgggtaaattagcagattgtacttcgcaagatttacgttataccgaactcttcttagttgaagggnactctgcggggggctctgctaaacaagctcgcgatcgtgaatatcaagcgattatgcctctacgtggtaaaattcttaatacttgggaagtctcttctgatgaagtattagcgtcacaagaagtgcatgatatttctgtggcgatcgggatggatcctgatagtgatgatttaagccaattacgttacggaaaaatttgtatccttgcggatgcggactccgatggtttacatatcgccactttgctttgtgctttatttgttcgtcatttcccggcattagtaaagcaaggtcatgtctatatggctatgccacctctttatcgtatcgatttaggtaaagaagtgagttatgcccttgatgaagcagaaaagaacgctattttgcaacgccttagccgtaaaaaaggtaagccaaatgtgcaacgctttaaaggcttaggtgagatgaatccactgcaattacgtgagacaacgcttgatcctaatacacgtcgtttagtgcaattggtgattgatgatgaaaattatcaagaaacgttgggcatgatggatatgttacttgccaaaaaacgttctgaagatcgccgtaactggttgcaagaaaaaggcgacgaagttgacatcgaagtgtaa

SEQ ID NO: 6940 - protein, 631 aa, Proteus mirabilis
  misc_feature (421)..(421): Xaa can be any naturally occurring amino acid
MTQSSYNAKDIEVLNGLEPVRRRPGMYTDTTRPNHLAQEVIDNSVDEALAGHATKVEVILYADQSIEVIDNGRGMPVDIHPELKVSAIELILAHLHAGGKFSNKNYQYSGGLHGVGISVVNALSKRIEVTVRREGKIYQIAFENGDKVEELHQIGTCAKRDTGTSVHFWPDSTYFDIPRFSSKSLSHVLKAKAVLCPGVNVSFTDKVNNTQETWCYADGLTDYLSEAVAEFVRLPEEPFTGKFEGDNEAVEWSMLWLPEGGDLLTESYVNLIPTVQGGTHVNGLRQGVLDAMREFCEFHNLLPRGIKLTADDTWERCAYVLSVKMQDPQFAGQTKERLSSRQTSAFVASAVKNAFSLWLNQNVQVGELLAEMAISSAQRRMRAAKKVVRKKLTSGPALPGKLADCTSQDLRYTELFLVEGXSAGGSAKQARDREYQAIMPLRGKILNTWEVSSDEVLASQEVHDISVAIGMDPDSDDLSQLRYGKICILADADSDGLHIATLLCALFVRHFPALVKQGHVYMAMPPLYRIDLGKEVSYALDEAEKNAILQRLSRKKGKPNVQRFKGLGEMNPLQLRETTLDPNTRRLVQLVIDDENYQETLGMMDMLLAKKRSEDRRNWLQEKGDEVDIEV

SEQ ID NO: 6941 - DNA, 2847 bp, Proteus mirabilis
  misc_feature (251)..(251): n is a, c, g or t
atgagtgaactgactcatgatggtgtagagcgccaaccgctccacttatttacggaaaatgcctatctcaattattcaatgtacgtgattatggatcgtgcattgccttttattggcgatgggttaaagccagtacagcgtcgtatcgtctatgcgatgtctgaattaggtttaaacagcagtgctaaatttaaaaaatcagcacgaacagtgggggatgtattaggtaaatatcatccccacggtgatancgcctgttatgaagccatggtattgatggcgcaacccttctcttatcgttatccattaattgatgggcaaggtaactggggggctccggatgatccaaaatctttcgcagctatgcgttataccgagtctcgcttatctaaatattcacagatcctgctaagcgaattgggacatggtactgttgattggatccccaattttgatggcaccctgcaagagccaaaaatgttgcctgctcgtttacctaatattttattaaatgggacaacggggattgctgtcggtatggcaacggatattccgccacataatgcgcgggaaatcggccaagcattaaccatgctattagataatcctgatgctgggttatctgatgttatgcaatatgtacaaggacctgattatccaacagaagcggaagtgatcaccgctcctgaggatatcaaaaagatttataaaacaggacgtggttctattagaatgcgtgctgtttggcaaaaagaagagggttgtgcggtgataacagctctccctcatcaagtctctggtgctaaggtacttgaacaaattgctgcattaatgcgagcgaaaaaattgcctttagttgatgatttacgtgatgagtcagatcatgaaaatcctactcgattggtgattgttcctcgtagtaatcgcgtcgatttagaacaagtcatgtattacttatttgtaaatacagacttagagaaaagttatcgcgttaacctcaatatgattgggttagataaccgtcctgctgtgaaagggctattaaccattttaaatgagtggttagtttatcgccgtcaaaccgtaaccaatcgtttaaaccatcgcttagaaaaagtattacgccgtttagaaattctaaaaggtttattaatcgcttatctcaatattgatgaagtgattgagatcatccgttatgaagatgagccaaaagccgaattaatgcgtcgttttgcattatcagatattcaagcagaagcgattttagagttacgtttacgtcacttagctaagcttgaagagataaaactgcaagctgaaagtgatgaactggaaaaagagcgcgacagtattgaaaaactgttaaattctcctcgccgtctcaatacgttattgaaaaaagagatagaggcagacgctaaagagtttggtgatgaacgacgttctcctattcgacctcaagaagaggcgaaagtggttaatgaacaagatatgttgccatcagagcctgtgactattgtgctttctgaaatgggatgggtgcgtagtgcgaaaggccacgaaattgatcctagtaccatgagttatcgtgccggagacagttatcatagtgcggtacggggtatgagcaaccagccagtattgttccttgattcaacgggtagaagctatagtttaagtcccaatgacatgccatcaggccgtagccaaggtgagcctttaaccggtaaattgaccttcccccctgacgccagcgtaaaatatatgttagcgggagccgctaaacaggagtatttactggcaacaaaagagggttatggctccgtactcagttatgaagagatggagacaaaaaataaaaccggtaaagggttgttaacggtttcagatgaaacagaattgctagcgcctttcttagtcgatgcagaaaagaaaaacaatcaacattggttagttattatcaccgataaaacacgtattctggcgatatctgcagaacatctaaatgagatgaataagaaaggtcgaggcactcgcttagttgcattaggcaaagagcaaagtgatgttatcgaacaaatcgtgttaatagcaaaaaatgaagccctcacatttactgttgatggtcaacaacaaacattaaaagcagaagagattagctattttagtggtgatgttggcgatgagcctatcccattaaaacatcttcaccctgaagcggttaccgtgatcatgtccgaaaaagggcttatccgttgccaaaaaggccataacattgatgcgaaatcagtgggctttaaaacaggggatgattattttgatgcagttgaagggatgagcaatcaagcggtacatctgattgataccacgggtcaaagttatactgttgatgttgatgcattaccatcaggccgtagtaaaggtgatgatttaactggacgattaaaagtccaaaaaggggctcaattacgtcatgtagtgatgggggaaagtagcgataagatcttaatggcatccgacgctggttatgggtttatctgtagtattgatgacttaacctctaaaaatagagctggtaaatcattattaacattacctgaaaatgcattaccattaccacctcaacgcttaaatgatgaattgagtgatttgatcatgatcattactcagggtgggcgaatgctgatttttgaagcctctgagttgccaactatggtaaaaggaaaaggtaaccaaatggtttctattcctgcttcacaggctgttaaagccaaacgtggtcgtcgtggaacctcgctccctcgtggtgcacaaagtatcgatcatatagatatcgaaactgattaa

SEQ ID NO: 6942 - protein, 948 aa, Proteus mirabilis
  misc_feature (84)..(84): Xaa can be any naturally occurring amino acid
MSELTHDGVERQPLHLFTENAYLNYSMYVIMDRALPFIGDGLKPVQRRIVYAMSELGLNSSAKFKKSARTVGDVLGKYHPHGDXACYEAMVLMAQPFSYRYPLIDGQGNWGAPDDPKSFAAMRYTESRLSKYSQILLSELGHGTVDWIPNFDGTLQEPKMLPARLPNILLNGTTGIAVGMATDIPPHNAREIGQALTMLLDNPDAGLSDVMQYVQGPDYPTEAEVITAPEDIKKIYKTGRGSIRMRAVWQKEEGCAVITALPHQVSGAKVLEQIAALMRAKKLPLVDDLRDESDHENPTRLVIVPRSNRVDLEQVMYYLFVNTDLEKSYRVNLNMIGLDNRPAVKGLLTILNEWLVYRRQTVTNRLNHRLEKVLRRLEILKGLLIAYLNIDEVIEIIRYEDEPKAELMRRFALSDIQAEAILELRLRHLAKLEEIKLQAESDELEKERDSIEKLLNSPRRLNTLLKKEIEADAKEFGDERRSPIRPQEEAKVVNEQDMLPSEPVTIVLSEMGWVRSAKGHEIDPSTMSYRAGDSYHSAVRGMSNQPVLFLDSTGRSYSLSPNDMPSGRSQGEPLTGKLTFPPDASVKYMLAGAAKQEYLLATKEGYGSVLSYEEMETKNKTGKGLLTVSDETELLAPFLVDAEKKNNQHWLVIITDKTRILAISAEHLNEMNKKGRGTRLVALGKEQSDVIEQIVLIAKNEALTFTVDGQQQTLKAEEISYFSGDVGDEPIPLKHLHPEAVTVIMSEKGLIRCQKGHNIDAKSVGFKTGDDYFDAVEGMSNQAVHLIDTTGQSYTVDVDALPSGRSKGDDLTGRLKVQKGAQLRHVVMGESSDKILMASDAGYGFICSIDDLTSKNRAGKSLLTLPENALPLPPQRLNDELSDLIMIITQGGRMLIFEASELPTMVKGKGNQMVSIPASQAVKAKRGRRGTSLPRGAQSIDHIDIETD

SEQ ID NO: 6943 - DNA, 2757 bp, Proteus mirabilis
  misc_feature (1540)..(1540): n is a, c, g or t
atgagaacgcaaagtcattctcatatcattgaattgactcatgtatcccaacattatggtgataccaaagcacttgatgatgtgacattgactattcctgccggaaaaatggtcggcttaataggcccggatggtgtcggaaaatcgagtttaatttctcttatttcaggagccagagaaattcagcaagggcaagtgatagtacttaatggtgatatgaatgatgttaatcaccggcgagctgtttgccccaaaattgcctatatgccacaagggttaggtaaaaatctttatcacacactttctgtttttgaaaacgtcgatttctttggtcgcttatttggtcaatccaaacaagagcgagaagagcgcatcaatgatttacttgaaagtacggggttagcgccttttaaggatagacctgcgggtaaactatctggtggtatgaagcaaaaactggggctttgctgtgcattaattcatgatccacaattgctgatcctcgatgaacccaccacaggggttgacccattatcacgggcgcaattttgggagttaattaatcgtatccgtaaacgtcaaaccaatatgagcgtattggttgcgacggcttatatggaagaggctgagcgttttgattggctggttgcaatggatgcaggtaaggttttagccacaggtcatgcggaagaattaaaggcgcaaacggcgacagatgaattagaagctgcttttattgagcttttaccggaagaaaaacgcaaaaaccatcaaaaagtgattattcctccacgggataaaagtgatgacgatattatcgccattgaggccaaagaattaacaatgcgctttggtcagtttgttgctgttgatcatgtcagttttcgtattcctaaaggcgaaatttttggttttctaggctcgaatggttgtggtaaatccaccaccatgaaaatgcttacaggtttacttgaggcaagtgaagggcgcgcttggttatttgggcaagaggttgatccaaaagatatcgaaacccgtaaacgcgttggttatatgtcgcaagcattctcactgtatagcgaattaacggttcgacaaaatttagagctacatgccaaactctttcatatcccagaacaggatattcctcaacgtatcaaagaaatgagtgagcgttttaatttgaccgatgtggaagatatgatgcctgacggtttacctttaggtattcgacaacgcttatcgttagcggtggcagtgatccacaaaccagaaatgctgatccttgatgaacccacctctggggttgaccctatcgctcgagatatgttctggaagctgatggttgatctctcaagacgtgacggtgtcactatttttatctctacccactttatgaatgaagcggcgcgctgtgacagaatgtctctgatgcatgccggaaaagtgctagtgacagatactccggctaatttagtgaaaaatagtcaatttgatacactagaagaagtatttattgattatttgaaaaaagcatccngtgaaacagaaacgcccgatattgaagataaacagctacaattgcctgcctctagtgaagaaagtgcggaaaaagcgttaaaacaacgatttagtttacgccgtttatttagttatagcattcgtgaagggatggaattacgccgtgacccagtacgccttaccttagcattactaggcacggtaatattgatgtttattatgggttacggcatcagtatggatgttgaaaacctacgctttgccattatggatagagatcaaacagggctaagtcaggcttatagtcaaaatctatcaggctctcgctattttattgaaaaagcgccgattaccgattataaccaacttgagcgtcgtctccgcagtggtgatattactgttgcgattgaaattccgcctaattttgctcgagatgttgctaaaggacataaagtaaaaataggggtttggattgatggcgcgatgccaaatcgtgcagaaactgtccgtgggtatattcaggcaatgcatctaacttggatgttagatatggccatgcgtcaacctaccaatatggttgatcaattttcccccattgatatcgaaacccgttatcgttataaccctgatgtaaaaagtttacccgccatagtacctgcggttattccgttgttgttgatgatgatccccgcgatgttaagcgccttgagtgtggtacgtgaaaaagagctaggctctattattaatttatacgttactccggtcactaaagccgagtttttattaggcaaacagatcccctatattttattgggaatgtttaacttttttatgctctgtgcgctttcggtatttgtttttggtgtcagttttaaaggaagcatgttaacactctcattaggggcgttgctttatatcactattgctacgggaatgggattactgatttcttgttttatgaaaagtcagattgcggctatttttggtacttcaattattaccttaattcctgctacgcaattctccggcatgattgacccagtatcatcattagaaggtattggtaaatggatagggcatatttatccgacttctcactttcttactatcactcgaggaacgttttcaaaaggacttaacttatttgatttgccttggtcttttattccgttacttatcacgatccccattgtgattgggctgagtgtctttttcttgaaaaagcaggaggcttaa

SEQ ID NO: 6944 - protein, 918 aa, Proteus mirabilis
  misc_feature (514)..(514): Xaa can be any naturally occurring amino acid
MRTQSHSHIIELTHVSQHYGDTKALDDVTLTIPAGKMVGLIGPDGVGKSSLISLISGAREIQQGQVIVLNGDMNDVNHRRAVCPKIAYMPQGLGKNLYHTLSVFENVDFFGRLFGQSKQEREERINDLLESTGLAPFKDRPAGKLSGGMKQKLGLCCALIHDPQLLILDEPTTGVDPLSRAQFWELINRIRKRQTNMSVLVATAYMEEAERFDWLVAMDAGKVLATGHAEELKAQTATDELEAAFIELLPEEKRKNHQKVIIPPRDKSDDDIIAIEAKELTMRFGQFVAVDHVSFRIPKGEIFGFLGSNGCGKSTTMKMLTGLLEASEGRAWLFGQEVDPKDIETRKRVGYMSQAFSLYSELTVRQNLELHAKLFHIPEQDIPQRIKEMSERFNLTDVEDMMPDGLPLGIRQRLSLAVAVIHKPEMLILDEPTSGVDPIARDMFWKLMVDLSRRDGVTIFISTHFMNEAARCDRMSLMHAGKVLVTDTPANLVKNSQFDTLEEVFIDYLKKASXETETPDIEDKQLQLPASSEESAEKALKQRFSLRRLFSYSIREGMELRRDPVRLTLALLGTVILMFIMGYGISMDVENLRFAIMDRDQTGLSQAYSQNLSGSRYFIEKAPITDYNQLERRLRSGDITVAIEIPPNFARDVAKGHKVKIGVWIDGAMPNRAETVRGYIQAMHLTWMLDMAMRQPTNMVDQFSPIDIETRYRYNPDVKSLPAIVPAVIPLLLMMIPAMLSALSVVREKELGSIINLYVTPVTKAEFLLGKQIPYILLGMFNFFMLCALSVFVFGVSFKGSMLTLSLGALLYITIATGMGLLISCFMKSQIAAIFGTSIITLIPATQFSGMIDPVSSLEGIGKWIGHIYPTSHFLTITRGTFSKGLNLFDLPWSFIPLLITIPIVIGLSVFFLKKQEA

SEQ ID NO: 6945 - DNA, 1053 bp, Morganella morganii
  misc_feature (750)..(750): n is a, c, g or t
atgaaaatttttgtggtagggccttcttgggttggggatatgatgatgtcccaaagcctatatcgtacattaaaagcgttacatcccgcggcaactattgatgtgatggcacccgcttggtgtcgtccattattagagaaaatgcccgaggtcgataatgccattgctatgcctttaggtcacggtgccttagcaattggtgagcgtcgccgcttaggtaaacaactaaaagccaaaggttatactcatgcttatgttttacctaactcatttaaatctgctttagtgcctttctttgccgctattcctaaacgtactggctggcgaggagaaatgcgttatggattattaaatgatttacgcccgttggataaagctgcatttcccttaatggtagagcgttatgtcgcgctagcttacgataaacagcaggtacattcagccgctgagttaccaaagccgttattatggccaaaactggctgtctctgacaaagatatcactaccacacttaagcacttttcattatctacacagcgtcctgctatcggtttttgtccgggggcggaatttggtcctgctaaacgctggcctcattaccactacgcgacattggcacagaaacttattagcgaatatggctatcagattttcttattcggttcacaaaaagataggccggcaggggaagagatcaaacacggcttaacccccgatgcccaagcagcttgtattaatctggccggtganacttctcttgagcaagccgttaacctcattgctgcttgtaaggccgtggtcagtaacgattctggcttaatgcatgtcgccgcagcattagagcgtccattagttgcactttatggcccaagtagtcccgactttacccccccgttatccgataaagcccgtgttattcgtttaattactggctatcacaaagtgcgtaaaggcgatgctgaacaaggttatcaccaaagcttaatcgacattcaaccggaacaggtctttagcgaactcgagcaattactcgctacggagccatcgctatga

SEQ ID NO: 6946 - protein, 350 aa, Morganella morganii
  misc_feature (250)..(250): Xaa can be any naturally occurring amino acid
MKIFVVGPSWVGDMMMSQSLYRTLKALHPAATIDVMAPAWCRPLLEKMPEVDNAIAMPLGHGALAIGERRRLGKQLKAKGYTHAYVLPNSFKSALVPFFAAIPKRTGWRGEMRYGLLNDLRPLDKAAFPLMVERYVALAYDKQQVHSAAELPKPLLWPKLAVSDKDITTTLKHFSLSTQRPAIGFCPGAEFGPAKRWPHYHYATLAQKLISEYGYQIFLFGSQKDRPAGEEIKHGLTPDAQAACINLAGXTSLEQAVNLIAACKAVVSNDSGLMHVAAALERPLVALYGPSSPDFTPPLSDKARVIRLITGYHKVRKGDAEQGYHQSLIDIQPEQVFSELEQLLATEPSL

SEQ ID NO: 6947 - DNA, 2334 bp, Serratia marcescens
  misc_feature (1576)..(1576): n is a, c, g or t
atgaatgaatcattaagccgaattattgcacaagagctatcagtaaagccccagcaagtactttcggccattacgttactggatgaagggaatacggtgccttttgtggcccgttaccgaaaagaggtaactggtgggttagatgatactcagcttcgtcaattggaaacccgcctgagttacttacgggaactcaatgatcgtcgccaaactattttaaaatcaattgaagagcaggggaaactcacagaagaattacgctcttcgattaatgagacgcaaagtaaaacagaacttgaagatctctaccttccttataaaccgaaacgtcgtactcgtgggcaaattgcaattgaaaatggcttagagccattagctgatttgttatggaatgaaccacaacatactcctgaagacgcagcaagtgcatatatcaaccctgaaaaaggaatagatgatagtaaagcagccctggatggggctcgctatatcttaatggaacgctttgcagaagatgctggattattagctaaagttcgccaatatttatggaaaaatgcgcatcttgttagcaaagttgttgacggaaaagaagcagaaggcgctaaatttagcgattattttgatactcatgagccgattgctcatgtaccttctcaccgtgcattagcgatgtttcgtggtcgtaatgaaggtattttgcagttatcacttaatcctgatccacaattcgaagaagcccccaaagagagctatggcgaacagttgattacggagcatttaggtttacgtcttaataatcaacccgcggatagttggcgtaaagccgttgtcagttggacttggcgtataaaagtgttaatgcatcttgaaactgagttaatgggtcagttacgtgagaaagcggaagatgaagccattaatgtgtttgcacgtaacctaaaagatctcttaatggccgcacctgcaggtatgcgagctacgatggggctagatcctggtttacgtactggggttaaagtcgcggtggtggatagtaccggtaagctgattgcgacagatactatttatcctcataccggacaagcggataaagccgctgctagtgtagcggcattatgtattaagcataatgtagagttggtggcgattggtaacggtactgcatcacgtgaaacagagcgcttttttgctgatacagtaaaacgctacccagaagttaaagcacaaaaagtgatcgtgagcgaagccggggcatcggtttattcggcatcagagctggcagcgaaagaatttccggatctggatgtttctcttcgtggcgctgtttctattgctcgtcgcttacaagatccattggcggaattggtaaaaattgaccctaaatctatcggggtgggtcaatatcagcatgatgtgagccaaacattattggcaaaaaaattagacactgttgttgaagactgtgtaaatggtgtcggtgttgatttaaatacagcctctgtaccgctattgacgcgagtggcggggcttagccaatctattgctcaaaatattattgcttggcgtgatgaanatggccgttttgtggatagaaaacagttactcaaagtggcgcgcttagggcctaaagcttttgagcagtgtgcgggatttttacgtattcgtgatggtaaaaatccacttgatgcctcaacggttcaccctgaagcctatcctattgttgaaaatatcttgcaatcaatacatcaaaaaattgatcaagtcatgggcaatagtgcattactttcacaaatcaatgccagagaatttgtcaccgagcagttcggtttacctaccattaatgacatcttaaaggagcttgctaaaccggggcgtgatcctcgtcctgagtttaaaacagccacctttgccgaaggtgttgaaacaatgaatgatttagtcagtggtatgatattggaaggtactgtaactaatgtgactaattttggtgcctttgtggatattggggtacaccaagatgggttagtgcatatttcatcactgtcggataaatttgttgaagatccccatactgtggtaaaaaccggcgatattgtgaaagtaaaagtccttgaagtcgatttaccgcgtaaacgtattgcgttaaccatgcgtttagatgaagtggctgctgatagtgatcataaacgccagtcagtgactaaggataatgcttctaaacatagtcgcgggcaaaaaccgaccagaaaccgccaatcaaatacgggtaacaatgcaggtaatagtgcgatgagcgatgcattggccgcagcatttggtaaaaaacgctaa

SEQ ID NO: 6948 - protein, 777 aa, Serratia marcescens
  misc_feature (526)..(526): Xaa can be any naturally occurring amino acid
MNESLSRIIAQELSVKPQQVLSAITLLDEGNTVPFVARYRKEVTGGLDDTQLRQLETRLSYLRELNDRRQTILKSIEEQGKLTEELRSSINETQSKTELEDLYLPYKPKRRTRGQIAIENGLEPLADLLWNEPQHTPEDAASAYINPEKGIDDSKAALDGARYILMERFAEDAGLLAKVRQYLWKNAHLVSKVVDGKEAEGAKFSDYFDTHEPIAHVPSHRALAMFRGRNEGILQLSLNPDPQFEEAPKESYGEQLITEHLGLRLNNQPADSWRKAVVSWTWRIKVLMHLETELMGQLREKAEDEAINVFARNLKDLLMAAPAGMRATMGLDPGLRTGVKVAVVDSTGKLIATDTIYPHTGQADKAAASVAALCIKHNVELVAIGNGTASRETERFFADTVKRYPEVKAQKVIVSEAGASVYSASELAAKEFPDLDVSLRGAVSIARRLQDPLAELVKIDPKSIGVGQYQHDVSQTLLAKKLDTVVEDCVNGVGVDLNTASVPLLTRVAGLSQSIAQNIIAWRDEXGRFVDRKQLLKVARLGPKAFEQCAGFLRIRDGKNPLDASTVHPEAYPIVENILQSIHQKIDQVMGNSALLSQINAREFVTEQFGLPTINDILKELAKPGRDPRPEFKTATFAEGVETMNDLVSGMILEGTVTNVTNFGAFVDIGVHQDGLVHISSLSDKFVEDPHTVVKTGDIVKVKVLEVDLPRKRIALTMRLDEVAADSDHKRQSVTKDNASKHSRGQKPTRNRQSNTGNNAGNSAMSDALAAAFGKKR

SEQ ID NO: 6949 - DNA, 2397 bp, Escherichia coli
  misc_feature (937)..(937): n is a, c, g or t
atgtctataaaaaaacaagaaaaaaggcttgctaatcaagaggggatgccattaacgcgtcgtcattttgtacaagccagtgcagcattagtgagtatgccttttttcgcacaaaatgcacaggccaatcttgataaaagcctacctattgccaacattgatgagaaacctgctactgtcgtcgcaacatgcagcacctttgactgtggtggtaaatgtgatatccgagctcatgttaaagagggaattgttacccgtattaccacaagaccagatgctgatttagatgaacaaatgccgataatgagagcctgcgtaagaggtagaggttatcgtaaattcacttatcatgcggatagacttaaatatcccatgaaacgtgtgggtaagcgcggtgaaggcaaatttgagcgtatctcttgggatgaagcaacctctttaattgctgagaatgtaacacgattaactcaacagcatggtgcagcaagtcgttttcttacggtaaataccgccgtcactggggggatcttctctggtgatactatgatgaaaaaactctttaatctcacaggaggatatcttccttattatcactcagtgagcttagggaataccgctaaagtcacaccttatacttatggcgtatctaaaacaggaagttctcttgatactttagcggatacgcctttagttattttgtggggacataatcccaacgaaaccatttttggtcacaccaatcactattttcaaaaaatgaaaaataatgggaccaaatttattgttgtcgatcctcgttattcagatacagcccaatctttagctgatcaatggatcccattacttcctaccacagataatgcactgatggatgcaatgatgtatgtcattgtgaccgaaaatttacatgataaagcgtttatcgataaatatgtgntaggttttgatgaagatcatatgcctgaaggggtgccagctaacgaatcattaatggcttatttattagggaaaaaagacggtatagcgaaaaccccagaatgggcgacaaaaatcacacgagtcccagccaatactatccgtcaattagcacgtgaatatgcgatgacaaaacccgcggccttaattcaaggttgggggccacaacgtcatatttgtggtgaacgtaccgcccgtggttcaacgttattagcagcaattactgggaatgtgggtaaaaaaggcgcttgggcggctggatatggcggaattggtaaccgtcaatctattcgtggtcctaatattggcaaaaatccggtaactgcacaaatatccattatgaattggatgcaagctgttgaggatgcgagcaaagtgacgccagaagatggccttattggcgtcgataaacttgatagtaatatcaaaatgatcttttctttagcgggtaactatcttgtcaatcaaaaccctgatgttaatgcggcagctaagttacttgaagatgaatctaaagtagagtttatcgttgttagtgatctatatatgtctccgtcagccaaatacgcagacttagttttaccagaaacgagctttttagagcgttggaatatcggtaatacatggggaacgggcaactatttcttactgtcagaaaaagtcgttgaacctgcttttgaaagacgttctgattatgaatggatcagcgatgttgctgagaaaatgggagtcaaagaggcttttaccgaaggacgaacagaaaaagagtggatagcttatctcgttaatactaacaaagaacgctttaaagatagacctgatttcccaacttttgatgaattactcaagactcgccgctatcttttcaaagatgcaccttttgttgcatttgaagaaaatattcgtgatccagaaaatcatcctttcccaactccatcaggaaaaattgaaattttctctaaacgtctctatgacatgaataatgtcgatattcctgcattatctcattatgttcctgcaattgaaggtccagaagataaattgaccgagaaatatccactacaaatgttaacttggaaaggaaaaaatagagctaattcaacgcaatatgctaacccttggttacaagaggtacaacgccaagaaatgtggataaaccctattgatgcacaaaatagaggcatcaaaaatggcgatatggtgcgtatctataacgacagagggatcacccaaatacccgctttagttaccgagcgaattattcctggtgtggttggtttacaggcgggggcttggtggtctcctgataaagacggtgttgatcatggtgggtgccctaacgttttgacatcaacacgtatgacaccattagcccatggtaattcacatttaaccgttttagttgaggtaaccaaagcatga

SEQ ID NO: 6950 - protein, 798 aa, Escherichia coli
  misc_feature (313)..(313): Xaa can be any naturally occurring amino acid
MSIKKQEKRLANQEGMPLTRRHFVQASAALVSMPFFAQNAQANLDKSLPIANIDEKPATVVATCSTFDCGGKCDIRAHVKEGIVTRITTRPDADLDEQMPIMRACVRGRGYRKFTYHADRLKYPMKRVGKRGEGKFERISWDEATSLIAENVTRLTQQHGAASRFLTVNTAVTGGIFSGDTMMKKLFNLTGGYLPYYHSVSLGNTAKVTPYTYGVSKTGSSLDTLADTPLVILWGHNPNETIFGHTNHYFQKMKNNGTKFIVVDPRYSDTAQSLADQWIPLLPTTDNALMDAMMYVIVTENLHDKAFIDKYVXGFDEDHMPEGVPANESLMAYLLGKKDGIAKTPEWATKITRVPANTIRQLAREYAMTKPAALIQGWGPQRHICGERTARGSTLLAAITGNVGKKGAWAAGYGGIGNRQSIRGPNIGKNPVTAQISIMNWMQAVEDASKVTPEDGLIGVDKLDSNIKMIFSLAGNYLVNQNPDVNAAAKLLEDESKVEFIVVSDLYMSPSAKYADLVLPETSFLERWNIGNTWGTGNYFLLSEKVVEPAFERRSDYEWISDVAEKMGVKEAFTEGRTEKEWIAYLVNTNKERFKDRPDFPTFDELLKTRRYLFKDAPFVAFEENIRDPENHPFPTPSGKIEIFSKRLYDMNNVDIPALSHYVPAIEGPEDKLTEKYPLQMLTWKGKNRANSTQYANPWLQEVQRQEMWINPIDAQNRGIKNGDMVRIYNDRGITQIPALVTERIIPGVVGLQAGAWWSPDKDGVDHGGCPNVLTSTRMTPLAHGNSHLTVLVEVTKA

SEQ ID NO: 6951 - DNA, 1074 bp, Proteus mirabilis
  misc_feature (550)..(550): n is a, c, g or t
atgaaatttactcctcaacataaaatggatgctgcattaatggcaggcgcatccttaaacacacccaataatcattcaatacaagagcaacatcatcgtttaaaagatgatgctaccgttagtgcttatatgagccagaattatatttctgtttctgtcgcagattcggttgaacatgtaaaagcacagctggttaatgatttaaaagatgaattaattccgacttatctgtatgtcgtagataaagataattatcttaacggtattttgccggttaaatcattactacttgctgataatgggctttttgtttcggatattatgcgccaaacatttttctcagtttcaccggagcaaagccgacatgatgtttatcagttaattagccaaagtggtttagacagtgtacctgtgatgcattttggtaagttagttggtgtattacgacctcaagatattgctgatttaattgaagatgaaaatacgctagatgcacaaatgcagggggcaacgtcgccattagaacaaccttatttagagacaagtccgnttactttgtggcgtaaacgtgttgtctggctattaatgctgtttattgctgaagcttataccagtacggtgttacatgcttttgaagacagacttgaagctgctatctctttagctttctttattccattattaattggtactggtggcaatagcggtacacaaattacctcaacattagtacgtgccatggcattaggtgaggtgagcttgcgtaatgtatggtcagtattaagaaaagagatcacgacctcgataatggtggctttaaccatgggaatagcaggatttattcgtgcttggaccttaggggttggcatggaagtgatgatagtggtgggattaacgctaatttcaattacggtttggagtgctattgtatcttctattattccaatggtattaaagcgtattggtgttgatcctgcggtggtgtctgcaccttttattgcaacatttattgatggtactgggcttattatctactttgaaatagcatctcataccatgagtgtgtttgcttaa

SEQ ID NO: 6952 - protein, 357 aa, Proteus mirabilis
  misc_feature (184)..(184): Xaa can be any naturally occurring amino acid
MKFTPQHKMDAALMAGASLNTPNNHSIQEQHHRLKDDATVSAYMSQNYISVSVADSVEHVKAQLVNDLKDELIPTYLYVVDKDNYLNGILPVKSLLLADNGLFVSDIMRQTFFSVSPEQSRHDVYQLISQSGLDSVPVMHFGKLVGVLRPQDIADLIEDENTLDAQMQGATSPLEQPYLETSPXTLWRKRVVWLLMLFIAEAYTSTVLHAFEDRLEAAISLAFFIPLLIGTGGNSGTQITSTLVRAMALGEVSLRNVWSVLRKEITTSIMVALTMGIAGFIRAWTLGVGMEVMIVVGLTLISITVWSAIVSSIIPMVLKRIGVDPAVVSAPFIATFIDGTGLIIYFEIASHTMSVFA

SEQ ID NO: 6953 - DNA, 693 bp, Proteus mirabilis
  misc_feature (542)..(542): n is a, c, g or t
atggataacaataaagaacgctttttatcaaatcttgcttctcaattaggtaggtcgttaaaaacgcaacctgaagctttacctgaaccagtaaatttatatccagaacaacgattaacggagctttctgatgatgaactttatcaatattttctcaatacagctcagttagcaggaagtacttatgaaacgacaacattgtcatctttacctaagcatttagagactctttgtgaacagtatggtttaccagtgatattaacgggtgatccacgattacaggaaagtggggtgattgattatttatcagaacactgtcatgccaatatttgggatcatactgagggtaaaaaaaatattgaacgggtaaaagaggcaaaagtcggaattgtatttgctgaatatggacttgcagaatctggcggtgttgttttattttctggggctgacaaaggaagaagtgttggattgatccctgaaaccacgatttttgtactaaaacgcagtacgattttacctcgagttgctcagttagcagaaanattacatcaaatggcattaaaaaatataagaatgccttcttgtattaatattattagtggtcctagttgcacatcagatattgaattaattaaggttgttggtgttcatggctctttaaatgcgatttatgtgattattgaagattgttaa

SEQ ID NO: 6954 - protein, 230 aa, Proteus mirabilis
  misc_feature (181)..(181): Xaa can be any naturally occurring amino acid
MDNNKERFLSNLASQLGRSLKTQPEALPEPVNLYPEQRLTELSDDELYQYFLNTAQLAGSTYETTTLSSLPKHLETLCEQYGLPVILTGDPRLQESGVIDYLSEHCHANIWDHTEGKKNIERVKEAKVGIVFAEYGLAESGGVVLFSGADKGRSVGLIPETTIFVLKRSTILPRVAQLAEXLHQMALKNIRMPSCINIISGPSCTSDIELIKVVGVHGSLNAIYVIIEDC

SEQ ID NO: 6955 - DNA, 1476 bp, Proteus mirabilis
  misc_feature (635)..(635): n is a, c, g or t
atgaaaacgcaaacgataaataatccgagaacccctacacttctcgagtcactgtttcctatatttacaatggtggtgctattaggcggaggttacgccgcttttgatttacctcccgaaccactaatggtgttatcaaccgtcgtcgcggcattattagttaaacgattaggctatcgttacgacgaaatcttaacggctatctcacaaaaaatcgccaaaacgatgccggctttgctgatcttaattagcgttggtttattaatcgggacatggatggtgggaggaaccattccactgatgatctactatggattaaagatgatcagtcctgaaatgctatatgttacagcactgctagtgacatcattagtatcagtttgtactggtacttcatggggctcggcgggcactattggcgtcgcttttatgggcgttgctgtcggtatggaggctaatcttgcagcaactgcgggtgccgttgttgctggtgcttactttggtgacaaactctcaccgctatcaggggatactaacctcgctgcaatggcggccagaatagatctttatcaacatatctgtcacctgctttataccacattaccttccttgatcctcacagcgattatcatgantgtttatggtatgaatggcgatttagcaggacaaggagtgcctgaaaaagtcaccttaattaccaatgggttggagaatatttatcacttcaacttgatcctgcttattcctgtattagtcattttatatggttcggtcacgaaaaaaccgactattccagttatgctagcctctgccgctattgcgatgttgaatgcttatcttattcaaggatttggcttacatgatatcgtaaaaagtgccgttgatggctttaatgtctccatgatccaaggtaaagaagtacctgaattattaggtaatttattaaatcgtggtggtatgaactccatgatgagcaccctacttatctgtttctgcgcactctcctttgcggggactctatctttaagcggtgcattagaagtgatagttcatgcactgctaaaaatggtgcattcaacgggatcgatgatcttagcgaccattgcctgtggactgaccatgattggtgttacttgcaatggacaaatctctattcttattcctatcgaaatgttacgtggtgcgtatattgaacgcggtttacaccctaaaaaccttgctcgtactgttgaagattccgccactatttttgagcctatcttaccttggactgctgccggtgcttatatggcgggcacattaggtgttgcaaccctaagttatttaccttgggctgtattgtgctggagtggcatcttctttgccatgttatggggtttcaccggttttggcattgctaaattaacaccagaagagcaggaagaaatgactgctgagcttggatcacattcagaattacaacttgatactaaataa

SEQ ID NO: 6956 - protein, 491 aa, Proteus mirabilis
  misc_feature (212)..(212): Xaa can be any naturally occurring amino acid
MKTQTINNPRTPTLLESLFPIFTMVVLLGGGYAAFDLPPEPLMVLSTVVAALLVKRLGYRYDEILTAISQKIAKTMPALLILISVGLLIGTWMVGGTIPLMIYYGLKMISPEMLYVTALLVTSLVSVCTGTSWGSAGTIGVAFMGVAVGMEANLAATAGAVVAGAYFGDKLSPLSGDTNLAAMAARIDLYQHICHLLYTTLPSLILTAIIMXVYGMNGDLAGQGVPEKVTLITNGLENIYHFNLILLIPVLVILYGSVTKKPTIPVMLASAAIAMLNAYLIQGFGLHDIVKSAVDGFNVSMIQGKEVPELLGNLLNRGGMNSMMSTLLICFCALSFAGTLSLSGALEVIVHALLKMVHSTGSMILATIACGLTMIGVTCNGQISILIPIEMLRGAYIERGLHPKNLARTVEDSATIFEPILPWTAAGAYMAGTLGVATLSYLPWAVLCWSGIFFAMLWGFTGFGIAKLTPEEQEEMTAELGSHSELQLDTK

SEQ ID NO: 6957 - DNA, 1455 bp, Proteus mirabilis
  misc_feature (112)..(112): n is a, c, g or t
atgtatttagggctagacttaggcacatcaagtgttaaagcgatcatcatgaatgagcaaggtgatgtcgttgccagtcattctatacctttaaccctctcacgccctcatnctcaatggtcagagcaagatccacaagcatggtggcaggcaactgatgaagcgataaaacaactgagtcgtactcaacctatggaacagatccaagccattggtctcagtggtcaaatgcatggcgcggtattacttgatgcgcagcaaaatatattacgccctgctattttatggaacgatggtcgcagtgtgaaacaatgtttacgactggcaaagcaataccctcaatttaaagaaattacgggcaatttagttatgcctgggtttacagcgcctaaattgcaatgggtcgcagaaaacgaagcggagatcttttgtcagattgctcatgtgctattaccaaaagattttctacgttggaaaatgagtggtaattttgccagtgatatgtcggatgcggcgggtacactgtggttggatatgcaaaaacgcgattggagtgatgaattattagcggcaacggggctttctcgatgtcaaatgccgacactatttgaaggtaaccagataacgggttacttactgccagaaattgctaaaaaatggcaaatgaaacaagtaccgattatagcgggtggtggtgataatgcagcgggtgcaattggtgtaggagtatatcaaccgggtcaaggaatgctctctttgggcacatccggtgtctattttgttgtcagtgaaaagtttctccaaaacagtgacaatgcggtacatagtttttgccatgcattgccacaaacttggcacttaatgtcggtaatattaagtgcggcttcttgtctagattgggcatgccaattaacggggatcagtgatgttggtgcaatgtttaaagaaatagaacagcatgcacattctgatagttccctactctttttaccttatctttctggtgaacggacaccttataataatgcggatgccaaaggtgtattttgggggttaactcaccaacatcagcgtgcggatttatgtcgagcggtgttagaaggtgtcagttttgcgttgaggcaaggaattgaagtggcggataaggctggacaacacgcagacaatataacgttaattggtggaggggcaagaagtgaatattggcgacaattactagctgatattacaggaaaaaccttggattatcgtcaaggtggtgatgttggtcccgcgctgggagctgctagactggcgcaattagcgataaatccggctcatttatcacaaattattctttctcagccaaaacttgaaacacgtcatgttcccaacttagaaaaacataaggcatatcaagataaatataatgcctttaaaaagctctacacacttattgaaacaatgaaaatataa

SEQ ID NO: 6958 - protein, 484 aa, Proteus mirabilis
  misc_feature (38)..(38): Xaa can be any naturally occurring amino acid
MYLGLDLGTSSVKAIIMNEQGDVVASHSIPLTLSRPHXQWSEQDPQAWWQATDEAIKQLSRTQPMEQIQAIGLSGQMHGAVLLDAQQNILRPAILWNDGRSVKQCLRLAKQYPQFKEITGNLVMPGFTAPKLQWVAENEAEIFCQIAHVLLPKDFLRWKMSGNFASDMSDAAGTLWLDMQKRDWSDELLAATGLSRCQMPTLFEGNQITGYLLPEIAKKWQMKQVPIIAGGGDNAAGAIGVGVYQPGQGMLSLGTSGVYFVVSEKFLQNSDNAVHSFCHALPQTWHLMSVILSAASCLDWACQLTGISDVGAMFKEIEQHAHSDSSLLFLPYLSGERTPYNNADAKGVFWGLTHQHQRADLCRAVLEGVSFALRQGIEVADKAGQHADNITLIGGGARSEYWRQLLADITGKTLDYRQGGDVGPALGAARLAQLAINPAHLSQIILSQPKLETRHVPNLEKHKAYQDKYNAFKKLYTLIETMKI

SEQ ID NO: 6959 - DNA, 972 bp, Morganella morganii
  misc_feature (746)..(746): n is a, c, g or t
gtgaaaataaatagaactgtcgccattattggcgaatgtatgatagagctaagtggccaaccttttttgccacaacaacagcgttttgggggcgatacattaaatacagcactgtatttagcgcgcctcattcctacattacatccgcaatatataacaggtttaggcactgataattacagtgccttaatgcaaaaagcatgggaaaaagaggggatcaactgccagtcagtgatcaccattcccgaaaaacttcccggtttatatgccattgaaattgatacttgtggtgagcgtagcttccattattggcgtagtgatgctgctgcacgttatattgcaacggacaaccgttttgcaacacatctagataccttgcccgacgatagtgttatctatcttagtggtatttcactggccattttaacgccgaaaggaaaagaagcgttaatcacgcaattaatccgccttaaacagcgagggctcaccttaattgtcgattcaaactttcggcctcgtttatgggatctaatacctcatgcgcaagagtggttcgaaaaactatatcgactcagtgatatcgctttagtcaccggagatgatgaacaagctctctggcaacaacccagccttactgagcaaaaaattgtcgaacgccttcatcaatggggcaataaaaacgtcattgttaaactaggagcaaaaggggctttctggtctgatggtgaaaataccggttatatctnccccaaaccgatacagcatgtcatagacactacagcagccggggattcttttaatgctggttttattgctgcatggctacaaaactaccctttgcctacatgttgtttatggggaaatacattagcaggattagttatccaacatcatggcgccattattccccataacatcactgattcattctattcactcatcaaggataaccatgagacagtcaattgttga

SEQ ID NO: 6960 - protein, 323 aa, Morganella morganii
  misc_feature (249)..(249): Xaa can be any naturally occurring amino acid
MKINRTVAIIGECMIELSGQPFLPQQQRFGGDTLNTALYLARLIPTLHPQYITGLGTDNYSALMQKAWEKEGINCQSVITIPEKLPGLYAIEIDTCGERSFHYWRSDAAARYIATDNRFATHLDTLPDDSVIYLSGISLAILTPKGKEALITQLIRLKQRGLTLIVDSNFRPRLWDLIPHAQEWFEKLYRLSDIALVTGDDEQALWQQPSLTEQKIVERLHQWGNKNVIVKLGAKGAFWSDGENTGYIXPKPIQHVIDTTAAGDSFNAGFIAAWLQNYPLPTCCLWGNTLAGLVIQHHGAIIPHNITDSFYSLIKDNHETVNC

SEQ ID NO: 6961 - DNA, 1014 bp, Proteus mirabilis
  misc_feature (148)..(148): n is a, c, g or t
gtgttaataaattctcttcgttcaactctcttattcagtgcactaggtttgttcagtgcttttgccgcaaatgcacaacaaaccaaacccacacttaccgtctatacctatgactcttttaccgcggattgggggcctggtccggcanttaaaaaagcatttgaacaacaatgtgattgtgagctaaaactggttgccctttcggatggggtttctctccttaatcgtttacgtatggaagggagtaaaagtaaggcagatattattttagggctagataacaatcttattcatgcggcaaaacagaccggactttttgcaccaagcaatattgatacatcaaaactggcattacctgaaaaatggactgatgacacttttgtgccttatgactacggttatttcgcttttatttacgataaaaatcgtattactcatccccctaaaagcatggatgagttgttaaatagccaacagccgtggaaaatcctttatcaagatccacgtaccagtacccccggcttaggcttaatgttatggatgcaatcactgtatccaaacaataccgctgagcagtggcaaaaattggcgaataaaacactgacagtaaccaaaggctggagtgagtcctatggcttattcttgaaaggagaaggggattttgtgcttagttacacctcatctccgggctaccatattttggctgataaaaaagacaattatgcggcagctatttttgatgaaggacactatttacaggtagaagttgcagccaagctaaaatccagcaaacagccagaattagctcagcaatttatgcaatttatgctaacccccgctttccaagaaaccatcccaaccactaattggatgtatcctgttattgatatgccactacctgaggtctactccgttatgcctaaaccgcaaaagtcattacaatttgatgctgatgtggtagccaaagagcgccaaacatggactcgtaattggcaatctgcggttagccgctaa

SEQ ID NO: 6962 - protein, 337 aa, Proteus mirabilis
  misc_feature (50)..(50): Xaa can be any naturally occurring amino acid
MLINSLRSTLLFSALGLFSAFAANAQQTKPTLTVYTYDSFTADWGPGPAXKKAFEQQCDCELKLVALSDGVSLLNRLRMEGSKSKADIILGLDNNLIHAAKQTGLFAPSNIDTSKLALPEKWTDDTFVPYDYGYFAFIYDKNRITHPPKSMDELLNSQQPWKILYQDPRTSTPGLGLMLWMQSLYPNNTAEQWQKLANKTLTVTKGWSESYGLFLKGEGDFVLSYTSSPGYHILADKKDNYAAAIFDEGHYLQVEVAAKLKSSKQPELAQQFMQFMLTPAFQETIPTTNWMYPVIDMPLPEVYSVMPKPQKSLQFDADVVAKERQTWTRNWQSAVSR

SEQ ID NO: 6963 - DNA, 546 bp, Morganella morganii
  misc_feature (248)..(248): n is a, c, g or t
atgtcaaaaagcgagaacaatcttatctggatagatctggaaatgactggccttgatcctgaacgcgatcgtattattgaaattgccactatcgtcaccgatccccaacttaatattttagctgaaggtcccgttattgccgtacatcaatcggataaattactcgcctcgatggatgaatggaatactacaacacatacggcaagtggtttagttcagcgggttaaagaaagtcagtatgacgatgnggctgcacaacaagccactatcgaattccttgaaaaatgggtgccacagggtgcatcaccgatctgtggtaatagtgtggggcaagatagacgttttctatttcgctatatgcctgaattagaaaaatattttcattatcgttatctcgatgtcagtacactaaaagagttagctcgtcgctggaaacctgaaatccttgaaggatttaagaaaaaaaatactcatcaagcgttggatgatattcgagaatctattgctgaattagcctattatcgccaaacctttattaaagagtag

SEQ ID NO: 6964 - protein, 181 aa, Morganella morganii
  misc_feature (83)..(83): Xaa can be any naturally occurring amino acid
MSKSENNLIWIDLEMTGLDPERDRIIEIATIVTDPQLNILAEGPVIAVHQSDKLLASMDEWNTTTHTASGLVQRVKESQYDDXAAQQATIEFLEKWVPQGASPICGNSVGQDRRFLFRYMPELEKYFHYRYLDVSTLKELARRWKPEILEGFKKKNTHQALDDIRESIAELAYYRQTFIKE

SEQ ID NO: 6965 - DNA, 462 bp, Proteus mirabilis
  misc_feature (262)..(271): n is a, c, g, or t
  misc_feature (349)..(349): n is a, c, g or t
atgttaaaaattagaatatcacgcccctcagaagcaccaaaaatcatacaaatctggaaaaattcagtcgatgctacacatgactttctgacagctgacgatcgccaagagattgaaaaagaagttatcggttttttttccgaaacaccggtatgggttgctactaatcaagaagactgcccactcggctttatgtttttacatgacggtcatctagaggcgctttttatcgatgcatcagcacgagggttagggataggannnnnnnnnngaaaacagttaatatcacacgcattaactcttcatcctaatttaagcgttgatgtcaatgaacaaaatcagcaagccntcggtttttatcagcatatgggctttcaaatatctggacgttcggagttggataatcaaggaagagcgtacccattattgcatctaagtagagctaagacgatcaccctttag

SEQ ID NO: 6966 - protein, 153 aa, Proteus mirabilis
  misc_feature (88)..(91): Xaa can be any naturally occurring amino acid
  misc_feature (117)..(117): Xaa can be any naturally occurring amino acid
MLKIRISRPSEAPKIIQIWKNSVDATHDFLTADDRQEIEKEVIGFFSETPVWVATNQEDCPLGFMFLHDGHLEALFIDASARGLGIGXXXXKQLISHALTLHPNLSVDVNEQNQQAXGFYQHMGFQISGRSELDNQGRAYPLLHLSRAKTITL

SEQ ID NO: 6967 - DNA, 1467 bp, Proteus mirabilis
  misc_feature (365)..(365): n is a, c, g or t
atgaagcaacgtttagaacaatcgacaactgccctaaatgccttacaaaaaaaacgtggagagcaattttatcctcaattccatttagccgctcctgcgggatggcttaatgatcctaatggccttgtttatcataacggcttatatcatgcattttatcaacatcatcctttttctgaactttgggggccgatgcattggggacatgctaccagcaaagatatgatccactggcaacatcagccaatcgcccttgctccgggcaatgagtatgataaaagtggttgcttttccggatcagcggtaagtcatgaaggtaaattatacctcttttataccggccataactggttagcagaagaagncgatgacagccaaatttaccaagcacaatgtgtggcagtcagtgaagatgggatccattttgaaaagaaaggcattatcttaccgccaccacaaggatatatgcactttcgtgatccaaaagtttggtttcaagaaggaaaatggtggatggtagtcggtgcccgcgatgaaaaagaccaaggccaagtgttacttttctccaatgacaccctatttgaagaagggaaacaatggcgttcggagtacaaggtattaggcaaaaccgatgataaaaacgtctacatgtgggaatgccctgacttttttcctatcagtgatgataacgaatttgctcttgttttttcaccacaaggaaaacgcgctgaaggttatcaataccgtaatctgtttcaaaccggtgcactgatcggtcagtggtcaccaaaacaaccttttatcatacatggtcattttactgagcttgataatggtcatgactattatgctccacaatcttttgttactgctgatggtcgccgtgtttctatgggatggatggatatgtggaactcccctatgccttcacaacaggagttttgggctggttgtttcacgcttcctcgtgaaattaactttgataaaagggcaaaccgtttacgtatgaccccgataaaagaagttgaaagtctaagacaaacaagaaatacgataaagatgaccacactcaataaccaaacgcttaaattactcgataagacaccggctattgagttaaatttaacctggtcattagatagccaagcggaaaaatttggattatggctaggaaaaggtttagaggtatttgtcgataatcaatcaaatcgctttgtgatccgtcgccattatccacaatataatatcagtggatcacgtagcacaccgttgccagtaggaagcgaaattaacttacgtatatttattgatcgctcatcaatagaggtttttatcaatcacggagagctgacctttagtagccgttattatgcagatgaaaatgatcgcgatttatcgctatttgccacagatggcagtgccacattaatcgccggtgaatattggacactatcaacgataagttga

SEQ ID NO: 6968 - protein, 488 aa, Proteus mirabilis
  misc_feature (122)..(122): Xaa can be any naturally occurring amino acid
MKQRLEQSTTALNALQKKRGEQFYPQFHLAAPAGWLNDPNGLVYHNGLYHAFYQHHPFSELWGPMHWGHATSKDMIHWQHQPIALAPGNEYDKSGCFSGSAVSHEGKLYLFYTGHNWLAEEXDDSQIYQAQCVAVSEDGIHFEKKGIILPPPQGYMHFRDPKVWFQEGKWWMVVGARDEKDQGQVLLFSNDTLFEEGKQWRSEYKVLGKTDDKNVYMWECPDFFPISDDNEFALVFSPQGKRAEGYQYRNLFQTGALIGQWSPKQPFIIHGHFTELDNGHDYYAPQSFVTADGRRVSMGWMDMWNSPMPSQQEFWAGCFTLPREINFDKRANRLRMTPIKEVESLRQTRNTIKMTTLNNQTLKLLDKTPAIELNLTWSLDSQAEKFGLWLGKGLEVFVDNQSNRFVIRRHYPQYNISGSRSTPLPVGSEINLRIFIDRSSIEVFINHGELTFSSRYYADENDRDLSLFATDGSATLIAGEYWTLSTIS

SEQ ID NO: 6969 - DNA, 1152 bp, Serratia marcescens
  misc_feature (39)..(48): n is a, c, g, or t
  misc_feature (772)..(772): n is a, c, g or t
atgcttcataaaaaattacatagcgaaatgtcatgggannnnnnnnnntcatgggaacaacttggtgagtactataatgaaattagtgatatgtccggtgttaggcaagatccgatccaccatgctgaaggtgatgtagctattcatacacagcaggtgatccacgctataaaatcactccctgaataccaagagctgtcagaaagagagcaacaaattctatggattgcagcacttttacatgatgtagaaaaacgttcaactacccgtgaagagaatgggcgaattatttcgccaggccatgctcgtaaaggagaattaacgacaagacgttttttatatgaaaaagtgccggttagttttattgatagggaacagattgcggcattagtacgctatcacggattacctttatggttaatggataaacccgatcctaaaaaagccttattagcggcttcgttaagagtagattgctatttattggcattgctggctaaggcggatgttctgggacgaagctgtgaagataagcccgctttattggataaaatagcgttatttacactttactgcgaagaattaaattgttggagaacacccgcacgatttatttctgatggcgctcgatttcactattttcatagtgaaaatagcgtcgatcctcactatgaaccttatcctgagcaaggaagtgaagttattgtgctttgtggactaccgggaatgggcaaagatagttatattcgccaatattgtgcagatatgcctntagtaagtttagatgtattacgtcagcagcataatataaaaccagatgatcgtgatgcgaatggatggattgcacaacttgccaaagagcaagcgagaatatatttaagagagcataagccttttgtttggaatgcaacaaatattactaaacaaatgcgtaatcaacttattgctctgttttatcgttatcaagctaaagtgacattggtatatattgaagtcccttatttgcaatggaaaaaacaaaacagcgcaagaaaggaagcggttcccgataaagtgatggaaagaatgttgagcaaactggaagtcccaacaccagaagaagcgcttaatgtgatttattgggttgatggggaagctcaaaatttgatttaa

SEQ ID NO: 6970 - protein, 383 aa, Serratia marcescens
  misc_feature (13)..(16): Xaa can be any naturally occurring amino acid
  misc_feature (258)..(258): Xaa can be any naturally occurring amino acid
MLHKKLHSEMSWXXXXSWEQLGEYYNEISDMSGVRQDPIHHAEGDVAIHTQQVIHAIKSLPEYQELSEREQQILWIAALLHDVEKRSTTREENGRIISPGHARKGELTTRRFLYEKVPVSFIDREQIAALVRYHGLPLWLMDKPDPKKALLAASLRVDCYLLALLAKADVLGRSCEDKPALLDKIALFTLYCEELNCWRTPARFISDGARFHYFHSENSVDPHYEPYPEQGSEVIVLCGLPGMGKDSYIRQYCADMPXVSLDVLRQQHNIKPDDRDANGWIAQLAKEQARIYLREHKPFVWNATNITKQMRNQLIALFYRYQAKVTLVYIEVPYLQWKKQNSARKEAVPDKVMERMLSKLEVPTPEEALNVIYWVDGEAQNLI

SEQ ID NO: 6971 - DNA, 669 bp, Serratia marcescens
  misc_feature (403)..(403): n is a, c, g or t
atgaataatgaagaaaaaaatcgtcgtcctataaaagcaagacaaaccaactgggcaactcgctgtagtcgctggctgcaaagcaaaggcgctacccccaatgggatctctttatttagtatcctattcgctgctatctccggtttgtttctctactttgctctcgctcactcccaaggcctacttcaatcaatccttcttattttaggtgcattagctatccagggtagacttatctgtaacctactcgatggcatggtcgcagttgaaggcggattaaaaagtcctgctggtgccgtttataacgaactaccagaccgaatagctgatacattgattattattggtgtaggttatggtttatccatcacttttcctatcgctattaccttaggctgggtanccgctttctttgcggtaatgacagcttatatccgtgtattaggtggtagttgtgggttagaacagcgttttacgggaccaatggccaagcaacatagaatggcattattaaccggtattgccattatctctgcatttattcccgctgaatggggagcatggctctgtttagtctccctgtggatcattatcttcggctctgtacttactaccattttgagaactcgccaaattttacgcgatttaacacaaggagttgatgaatga

SEQ ID NO: 6972 - protein, 222 aa, Serratia marcescens
  misc_feature (135)..(135): Xaa can be any naturally occurring amino acid
MNNEEKNRRPIKARQTNWATRCSRWLQSKGATPNGISLFSILFAAISGLFLYFALAHSQGLLQSILLILGALAIQGRLICNLLDGMVAVEGGLKSPAGAVYNELPDRIADTLIIIGVGYGLSITFPIAITLGWVXAFFAVMTAYIRVLGGSCGLEQRFTGPMAKQHRMALLTGIAIISAFIPAEWGAWLCLVSLWIIIFGSVLTTILRTRQILRDLTQGVDE

SEQ ID NO: 6973 - DNA, 1326 bp, Pseudomonas aeruginosa
  misc_feature (831)..(831): n is a, c, g or t
atgaaagtgatgaagtggagcgccattgcactggcggtttccgcaggtagcactcagttcgccgtggccgacgcattcgtcagcgatcaggccgaagcgaaggggttcatcgaagacagcagcctgaacctgctgctccgcaactactatttcaaccgtgacggcaaggaaggtcggggtgatcgcgtcgattggacccagggcttcctcaccacctacgaatccggcttcactcaaggcaccgtgggcttcggcgtcgatgccttcggctacctgggcctgaagctcgacggcacctccgacaagaccggcaccggcaacctgccggtgatgaacgacggcaagccgcgcgatgactacagccgcgccggcggcgccgtgaaggtgcgcatctccaagaccatgctgaagtggggcgagatgcaaccgaccgccccggtcttcgccgctggcggcagccgcctgttcccgcagaccgcgaccggcttccagctgcagagcagcgaattcgaagggctcgacctcgaggcaggccacttcaccgagggcaaggagccgaccaccgtcaaatcgcgcggtgagctctacgccacctacgccggccagacagccaagagcgccgacttcgctggcggccgctacgcgatcaccgacaacctcagcgcctccctctatggcgcagagctgaaagacatctatcgccagtactacctgaacaccaactacaccatcccgctggcctccgatcaatcgctgggcttcgacttcaacatctaccgcaccaccgacgaaggcaagtccaaggctggcgacatcagcaacaccacctgntccctggcgggcgcgtataccctggacgcccacaccttcaccctggcctaccagcaggtgcatggcgacgagccgttcgactacatcggcttcggcggcaacggttccggcgccggcggcgactcgatcttcctcgccaactccgtccagtactccgacttcaacggtcctggcgagaaatcctggcaggcccgctacgacctgaacctggcctcctacggcgttcctggcctgaccttcatgctgcgttacatcaatggtaaggacatcgacggtaccaaggtcgattccagctcctcctatgcaggcctgtacggcgaggatggcaagcaccacgaaaccaacctcgaagccaagtacgtggtccagcccggtccggccaaggacctgtcgttccgcatccgccaggcctggcaccgtgccaacgccgaccagggcgaaggcgaccagaacgagttccgcctgatcgtcgactatccgctgtcgatcctgtaa

SEQ ID NO: 6974 - protein, 441 aa, Pseudomonas aeruginosa
  misc_feature (277)..(277): Xaa can be any naturally occurring amino acid
MKVMKWSAIALAVSAGSTQFAVADAFVSDQAEAKGFIEDSSLNLLLRNYYFNRDGKEGRGDRVDWTQGFLTTYESGFTQGTVGFGVDAFGYLGLKLDGTSDKTGTGNLPVMNDGKPRDDYSRAGGAVKVRISKTMLKWGEMQPTAPVFAAGGSRLFPQTATGFQLQSSEFEGLDLEAGHFTEGKEPTTVKSRGELYATYAGQTAKSADFAGGRYAITDNLSASLYGAELKDIYRQYYLNTNYTIPLASDQSLGFDFNIYRTTDEGKSKAGDISNTTXSLAGAYTLDAHTFTLAYQQVHGDEPFDYIGFGGNGSGAGGDSIFLANSVQYSDFNGPGEKSWQARYDLNLASYGVPGLTFMLRYINGKDIDGTKVDSSSSYAGLYGEDGKHHETNLEAKYVVQPGPAKDLSFRIRQAWHRANADQGEGDQNEFRLIVDYPLSIL

SEQ ID NO: 6975 - DNA, 1104 bp, Pseudomonas aeruginosa
  misc_feature (37)..(37): n is a, c, g or t
atgtaccgccatatcccgctcgtcgccctgtccctgntttcctccctgttcctcgccgcctgcggcaacggcacgccgccgccagccgcggcgcgtccggcgatcgtcgtccagccccagccggcgggggaggtgagccaggcctttccaggcgagatccgcgcccgccacgagccggagctggccttccgcatcggcggcaaggtcatccgccggctggtggaagtcggcgagcgggtaaagaaggaccagcccctggccgaactcgatccccaggacgtgcgcctgcaactggaggcggcgcgggcccaggtcagtgccgccgaggccaacttgcagaccgtgcgcgccgagtaccggcgctaccgcaccttgctcgaccgcaacctggtcagccattcccagttcgagaacatccagaacagctaccgcgccggcgaggcgcggctgaagcagatccgcgccgaattcaacgtcgccgacaaccaggccggctacgccgtgctgcgctcgccccaggatggcgtgatcgccagccggcgcgtcgaggtgggccaggtggtggcggccggacagacggtcttcagcctggccgccgacggcgaacgcgaggtgctgatcggcctgccggaacacagcttcgaacgtttccgcatcggccagccggtgtcggtcgaactctggtcgcaacgcgacagacgcttcgccgggcatatccgcgagctctcgcccgcggccgatccgcaatcgcgtaccttcgccgcccgggtggccttcgacgaccgcgcgactccggccgaactgggccagagcgcgcgggtctacgtcgccgccgccgaggcggtgccgttatcggttcccttgtcggcgctgaccgcagaggccggccaggcgttcgtctgggtggtcgagccgggcagctcgaccctgcgccggcaggcggtgcgcaccggtccctatgccgaggaccgggtgccggtgctcgaaggcctgaaggctggcgactgggtggtggccaccggggtccaggtgcttcgcgaagggcagcaggtgcgtccgatcgaccgggccaaccgcacggtgaaactggcggccaaggagtag

SEQ ID NO: 6976 - protein, 367 aa, Pseudomonas aeruginosa
  misc_feature (13)..(13): Xaa can be any naturally occurring amino acid
MYRHIPLVALSLXSSLFLAACGNGTPPPAAARPAIVVQPQPAGEVSQAFPGEIRARHEPELAFRIGGKVIRRLVEVGERVKKDQPLAELDPQDVRLQLEAARAQVSAAEANLQTVRAEYRRYRTLLDRNLVSHSQFENIQNSYRAGEARLKQIRAEFNVADNQAGYAVLRSPQDGVIASRRVEVGQVVAAGQTVFSLAADGEREVLIGLPEHSFERFRIGQPVSVELWSQRDRRFAGHIRELSPAADPQSRTFAARVAFDDRATPAELGQSARVYVAAAEAVPLSVPLSALTAEAGQAFVWVVEPGSSTLRRQAVRTGPYAEDRVPVLEGLKAGDWVVATGVQVLREGQQVRPIDRANRTVKLAAKE

SEQ ID NO: 6977 - DNA, 2421 bp, Pseudomonas aeruginosa
  misc_feature (1397)..(1397): n is a, c, g or t
atgagcgagaacaacacgtacgactcttccagcatcaaggtgctgaaggggctggatgccgtacgcaagcgccccggcatgtacatcggcgacaccgacgatggcaccggtctgcaccacatggtgttcgaggtggtggataactccatcgacgaagcgctggccggttactgcagcgaaatcagcatcaccatccatacggatgagtcgatcactgtccgcgacaatggacgcggtattccggtggatatccacaaggaagaaggggtttctgcggcggaagtgatcatgaccgtcctccacgccggcggcaagttcgacgacaacacctacaaggtgtccggcggcttgcacggtgtgggcgtctcggtggtgaacgcgctgtcccatgaactacgcctgaccatccgtcgccacaacaaggtctgggaacaggtctaccaccacggcgttccgcagttcccactgcgcgaagtgggcgagaccgatggctccggcaccgaagttcacttcaagccgtccccggagaccttcagcaacatccacttcagttgggacatcctggccaagcgcatccgcgagctgtccttcctcaactccggcgtcggcatcctgctgcgcgacgagcgtaccggcaaggaggagctgttcaagtacgaaggcggtctgaaggccttcgtcgagtacctgaacaccaacaagaccgcggtgaacgaggtattccacttcaacgtccagcgtgaagaggacggcgtgggtgtggaagtcgccttgcagtggaacgacagcttcaacgagaacctgctctgcttcaccaacaacatcccgcagcgtgacggcggcacccacctggccggtttccgttcggcgctgacgcgtaacctgaacaactacatcgaggccgaaggcctggcgaagaagttcaagatcgccaccaccggcgacgatgcccgcgaaggcctcaccgcgatcatctcggtgaaggtaccggacccgaagttcagctcgcagaccaaggacaagctggtctcctccgaggtgaagactgcggtggaacaggagatgggcaagtacttcgccgacttcctgctggagaatcccaacgaagccaaggccgtggtcggcaagatgatcgacgccgcccgtgcccgcgaggccgcgcgcaaggcgcgcgagatgacccgccgcaagggcgcgctggacatcgccggcctgcccggcaaactggccgattgccaggaaaaggacccggcgctctccgaactgtacatcgtggagggtgactccgcgggcggttccgccaagcagggccgcaatcgccggacccaggcgatcctgccgctcaagggcaagatcctcaacgtcgaaaaggcgcgcttcgacaagatgctctcctnccaggaggtcggtacgctgatcaccgccctgggctgtggcatcggccgcgaggaatacaacatcgacaagctgcgctaccacaacatcatcatcatgaccgatgctgacgtcgacggttcgcacatccgcaccctgctgttgaccttcttcttccgccagatgcccgagctgatcgagcgtggctacatctacatcgcccagcccccgttgtacaaggtcaagcgcggcaagcaggagcagtacatcaaggacgaccaggccatggaagagtacatgacccagtcggccctggaagacgccagcctgcacgtcaacgagcacgctccgggcctgtccggggcggcgctggagaaactggtcaacgagtatcgcggggtgatcgccaccctcaagcgcctgtcgcgcctgtacccccaggagctgaccgagcacttcatctacctgcctaccgtgtcggtggacgacctggctaacgagtcggccatgcagggctggttggagaagttccaggcgcgcctgaccgccgccgagaagtccggcctgacctacaaggccagcctgcgcgaagaccgcgagcgccacctgtggctgcccgaggtggaactggtggcccacggcctgtccagctacgtcaccttcaaccgtgacttcttcgccagcaatgactaccgctcggtgtcgctgctcggcgaccagttgaacagcctgctggaagacggcgcctacgtgcagaagggtgagcgcaagcgcccgatcagcgccttcaaggacggcctggactggctgatggccgaaggtaccaagcgccacagcatccagcgatacaaggggctgggcgagatgaaccctgagcagctgtgggaaaccaccatggatccgaacgtccggcgcatgctcaaggtgaccatcgaggacgccatcgccgccgaccagatcttcaacaccctgatgggcgatgccgtggagccgcgccgcgacttcatcgaaagcaacgcgctggcggtgtcgaacctggacgtgtga

SEQ ID NO: 6978 - protein, 806 aa, Pseudomonas aeruginosa
  misc_feature (466)..(466): Xaa can be any naturally occurring amino acid
MSENNTYDSSSIKVLKGLDAVRKRPGMYIGDTDDGTGLHHMVFEVVDNSIDEALAGYCSEISITIHTDESITVRDNGRGIPVDIHKEEGVSAAEVIMTVLHAGGKFDDNTYKVSGGLHGVGVSVVNALSHELRLTIRRHNKVWEQVYHHGVPQFPLREVGETDGSGTEVHFKPSPETFSNIHFSWDILAKRIRELSFLNSGVGILLRDERTGKEELFKYEGGLKAFVEYLNTNKTAVNEVFHFNVQREEDGVGVEVALQWNDSFNENLLCFTNNIPQRDGGTHLAGFRSALTRNLNNYIEAEGLAKKFKIATTGDDAREGLTAIISVKVPDPKFSSQTKDKLVSSEVKTAVEQEMGKYFADFLLENPNEAKAVVGKMIDAARAREAARKAREMTRRKGALDIAGLPGKLADCQEKDPALSELYIVEGDSAGGSAKQGRNRRTQAILPLKGKILNVEKARFDKMLSXQEVGTLITALGCGIGREEYNIDKLRYHNIIIMTDADVDGSHIRTLLLTFFFRQMPELIERGYIYIAQPPLYKVKRGKQEQYIKDDQAMEEYMTQSALEDASLHVNEHAPGLSGAALEKLVNEYRGVIATLKRLSRLYPQELTEHFIYLPTVSVDDLANESAMQGWLEKFQARLTAAEKSGLTYKASLREDRERHLWLPEVELVAHGLSSYVTFNRDFFASNDYRSVSLLGDQLNSLLEDGAYVQKGERKRPISAFKDGLDWLMAEGTKRHSIQRYKGLGEMNPEQLWETTMDPNVRRMLKVTIEDAIAADQIFNTLMGDAVEPRRDFIESNALAVSNLDV

SEQ ID NO: 6979 - DNA, 813 bp, Pseudomonas aeruginosa
  misc_feature (646)..(646): n is a, c, g or t
atggacccgcgtcaagcctgcctcgattgtctcgcccaggaaccgccagcgctgttcgaggcggccctgtggatcgccgcggagcacctcccggcgtattcgcccgcccacgccctgcgcgagctcgacgaactcgtccggcagatcggcgccagcctggacgaccgcgcctcggccagcgagcgcgcccaggggttgctgcggcgaatgagcgaacagggtttctgcgaagacgacgacttccccctgcaaccgcgctcggccctgctcccgctggtgctgcagcggcgccagggacagccgttgtcgctggcgctggtggccatggaactggcgcggcggctggacattccgctggtcggagtgaacttcccgggacgcttcctgctgcgcgtgccgcaggccgaccatctgctcgacccggccaccgggcgacgcctctatacccccgactgccgcgaactgctgctgcgcctgcaagggccgaagagcgaactgcaagccgcctacctgaagcaggcctctcccggggaaatcctccagcgtctgtcgcgcaacctgcgacaactgcacagcgccgccggcgagccgctggccgcgctgaaggatgcccagcgggtgatcgaactcggcccggtgggcgccnccgaccacgaggcccgcgccggcctctatcggcaactggattgcccgcaggcggaacgctacgacctggaacgcgcgctcttgctcagcgacgatcccaccgagcaactgcgcctcggccagcgcctgggcgaactcgccccgccgaccagccgcgccctgcactga

SEQ ID NO: 6980 - protein, 270 aa, Pseudomonas aeruginosa
  misc_feature (216)..(216): Xaa can be any naturally occurring amino acid
MDPRQACLDCLAQEPPALFEAALWIAAEHLPAYSPAHALRELDELVRQIGASLDDRASASERAQGLLRRMSEQGFCEDDDFPLQPRSALLPLVLQRRQGQPLSLALVAMELARRLDIPLVGVNFPGRFLLRVPQADHLLDPATGRRLYTPDCRELLLRLQGPKSELQAAYLKQASPGEILQRLSRNLRQLHSAAGEPLAALKDAQRVIELGPVGAXDHEARAGLYRQLDCPQAERYDLERALLLSDDPTEQLRLGQRLGELAPPTSRALH

SEQ ID NO: 6981 - DNA, 510 bp, Pseudomonas aeruginosa
  misc_feature (31)..(31): n is a, c, g or t
atgcctgacgtcgatcgtttcgggcgcttgncctggttgtggatcaccgtgctggtgttcgtcctcgaccaggtcagcaaggcgttcttccaggccgaactgagcatgtaccagcagatcgtggtgatccctgatctgttcagctggaccctggcctacaacaccggtgccgccttcagcttcctggccgacagctcgggctggcagcgctggctgttcgccctgatcgccatcgtcgtcagcgcgatcctggtggtctggctgaaacgcctgaagaaaggcgagacctggttggccatcgccctggcgctggtgctcggtggcgccctgggcaacctctacgaccgcatggttcttggccacgtggtggacttcatcctggtgcactggcagaaccgctggtacttcccggcgttcaacctggccgatagcgccatcaccgtcggcgccgtcatgctggcgctcgacatgttcagatcgaagaaatccggagaagccgcccatggctga

SEQ ID NO: 6982 - protein, 169 aa, Pseudomonas aeruginosa
  misc_feature (11)..(11): Xaa can be any naturally occurring amino acid
MPDVDRFGRLXWLWITVLVFVLDQVSKAFFQAELSMYQQIVVIPDLFSWTLAYNTGAAFSFLADSSGWQRWLFALIAIVVSAILVVWLKRLKKGETWLAIALALVLGGALGNLYDRMVLGHVVDFILVHWQNRWYFPAFNLADSAITVGAVMLALDMFRSKKSGEAAHG

SEQ ID NO: 6983 - DNA, 1140 bp, Pseudomonas aeruginosa
  misc_feature (514)..(514): n is a, c, g or t
atgtcgccgatttcagtcgttatcgccggttacgcccgttcgccgttccacttcgccaggaaaggcgcgctggtcgatatccgcccggatgacctggccgccgcggtgctcaaggggctggtggagaaactcgatctcgaccctgcgctgctggaggacgtggtcatgggctgcgcctatccggaggcggaacagggcatgaacatcgcgcgcatcgccagtttccgtgccggcttcccgcagagcctcggcggtgcgaccctcaaccgtttctgcggttcgtccatgagcgccgtccactacgccgccgggcaagtcctgctgggcgccggagaagccttcatcgccgccggggtagagtcgatgacgcgggtgccgatgggcggcttcaacctgtcgcccaatcccgcgttgctgcaggactatccggcggtatacatgagcatggggcagaccgccgagaatgtcgccgagcgctacgccgtcagccgcgtcgagcaggaagagatggccntacgctcccacgccaaggcagtcgccgcgcgcgaggccggcttgctgcgccaggagatcgtcgccatcgacacccccgccggccgggtcgccgaggatggctgcatccgcccgggtaccaacctggagagcctggcccagttgaagccggcgttcggcggcagcgtcaccgccgccacctcgtcgccgctcaccgatggcagcgccgcgctgttggtctgtagcgaggacttcgcgcgccgccacgggctggcgatcctggcgcggatcaaggcggtggcggtggccggttgtgcgccggagatcatgggcatggggccggtgcaggcgacgcgcaaggttctgcaacgggccgggctgggcatcgccgacatcgacctggtggagatcaacgaggccttcgccagccaatccatcgcctgcatccgcgaactggggctggacatggacaggatcaacctggatggcggcgccctggccatcggtcatccgctgggcgccaccggcgcgcggatcaccggcaaggccgctgcgttgctgcggcgcaccggcgggcgctatgccatcgccacccagtgcatcgccggcggccagggcgtggcgaccctgctggaagcggtggagtga

SEQ ID NO: 6984 - protein, 379 aa, Pseudomonas aeruginosa
  misc_feature (172)..(172): Xaa can be any naturally occurring amino acid
MSPISVVIAGYARSPFHFARKGALVDIRPDDLAAAVLKGLVEKLDLDPALLEDVVMGCAYPEAEQGMNIARIASFRAGFPQSLGGATLNRFCGSSMSAVHYAAGQVLLGAGEAFIAAGVESMTRVPMGGFNLSPNPALLQDYPAVYMSMGQTAENVAERYAVSRVEQEEMAXRSHAKAVAAREAGLLRQEIVAIDTPAGRVAEDGCIRPGTNLESLAQLKPAFGGSVTAATSSPLTDGSAALLVCSEDFARRHGLAILARIKAVAVAGCAPEIMGMGPVQATRKVLQRAGLGIADIDLVEINEAFASQSIACIRELGLDMDRINLDGGALAIGHPLGATGARITGKAAALLRRTGGRYAIATQCIAGGQGVATLLEAVE

SEQ ID NO: 6985 - DNA, 1740 bp, Pseudomonas aeruginosa
  misc_feature (1510)..(1510): n is a, c, g or t
atgaaactgaactatttccagggcgccctctacccatggcggttctgcgtgatcgtcggcctgctgctggcgatggtcggcgccatcgtctggcgaatcgtcgacctgcacgtgatcgaccatgacttcctcaagggccagggcgacgcgcgtagcgtgcggcatatcgccatccctgcgcaccggggcctgatcactgaccgcaacggcgaaccgctggcggtgagcaccccggtcaccaccctgtgggccaaccccaaggagctgatgaccgccaaggaacgctggccgcaactggcggcggcgctcgggcaggataccaagctgttcgccgaccgcatcgagcagaacgccgagcgcgagttcatctacctggtccgtgggctgaccccggaacagggcgaaggcgtgatcgccctgaaggtgccgggcgtgtactccatcgaggagtttcggcgtttctacccggctggcgaagtggtagctcatgcggtcggcttcaccgatgtcgacgaccgcggtcgcgaaggtatcgagctggctttcgacgaatggctggccggcgtgccgggcaagcgccaggtgctcaaggatcgccgtggccgcgtgatcaaggacgtgcaggtcaccaagaatgccaaaccgggcaagacccttgcgctgtccatcgacctgcgcctgcagtacctggctcatcgcgaactgcgcaacgctctgctggaggacggcgccaaggccggcagcctggtgatcatggatgtgaagaccggggagatcctggccatgaccaaccagccgacctacaacccgaacaatcgtcgtaacctgcagccggcggccatgcgcaaccgggcgatgatcgacgtgttcgagccgggctcgacggtcaagccgttctcgatgagcgcggcgctggccagcgggcgctggaaacccagcgatatcgtcgacgtctacccgggcaccctgcagatcggccgctacaccattcgcgacgtatcgcgcaattcgcggcaactcgatctcaccggcatcctgatcaagtcgagcaacgtcggcatcagcaagatcgccttcgacatcggcgccgaatccatctactcggtcatgcaacaggtcggccttgggcaggacacggggttgggcttccccggcgagcgcgtcggcaacctgcccaaccaccgcaagtggccgaaggcggaaaccgcgaccctggcctacggctacggtctctcggtaaccgcgatccagttggcgcatgcctatgcggccctggccaacgacggcaagagcgtgccgctgagcatgacccgagtcgaccgcgtgccggatggcgtgcaggtgatctcgcctgaagtggcttccaccgtgcagggcatgctgcaacaagtggtcgaggcccagggcggggtgttccgcgcccaggtgccgggttaccacgccgccggcaagagcgggaccgcgcgcaaggtctcggtcggcaccaagggctaccgggaaaacgcctatngctcgctgttcgccggtttcgccccggccaccgatccgcgcatcgcgatggtcgtggtgatcgacgagccgagcaaggcgggctacttcggcggcctggtgtcggcgccggtgttcagcaaggtcatggctggcgcgctgcgcctgatgaacgtgccgccggataacctgccgacggccaccgaacagcagcaggtcaatgctgcgcccgcaaaaggagggcgtggctga

SEQ ID NO: 6986 - protein, 579 aa, Pseudomonas aeruginosa
  misc_feature (504)..(504): Xaa can be any naturally occurring amino acid
MKLNYFQGALYPWRFCVIVGLLLAMVGAIVWRIVDLHVIDHDFLKGQGDARSVRHIAIPAHRGLITDRNGEPLAVSTPVTTLWANPKELMTAKERWPQLAAALGQDTKLFADRIEQNAEREFIYLVRGLTPEQGEGVIALKVPGVYSIEEFRRFYPAGEVVAHAVGFTDVDDRGREGIELAFDEWLAGVPGKRQVLKDRRGRVIKDVQVTKNAKPGKTLALSIDLRLQYLAHRELRNALLEDGAKAGSLVIMDVKTGEILAMTNQPTYNPNNRRNLQPAAMRNRAMIDVFEPGSTVKPFSMSAALASGRWKPSDIVDVYPGTLQIGRYTIRDVSRNSRQLDLTGILIKSSNVGISKIAFDIGAESIYSVMQQVGLGQDTGLGFPGERVGNLPNHRKWPKAETATLAYGYGLSVTAIQLAHAYAALANDGKSVPLSMTRVDRVPDGVQVISPEVASTVQGMLQQVVEAQGGVFRAQVPGYHAAGKSGTARKVSVGTKGYRENAYXSLFAGFAPATDPRIAMVVVIDEPSKAGYFGGLVSAPVFSKVMAGALRLMNVPPDNLPTATEQQQVNAAPAKGGRG

SEQ ID NO: 6987 - DNA, 1215 bp, Pseudomonas aeruginosa
  misc_feature (14)..(14): n is a, c, g or t
atgccgacattgcncctggacgccctgtccaccaccgccctcgccctgctcctgctcgccctcggcagccaattgaagaagcgcagccgctggctgacacgtctgtgcgtaccgtcgccggtgatcgccggcttcggcttcgccttcctggtctggctgctcagggatcgcggctggctcgacatcggcctcgacaccagcctgcagacacccctgatggtggcgttcttcaccaccgtcggcctcggtggcagcctcggcctgctgcgcaagggcggcaagaccctgctggtctacctgtcggcctgctgggcgctggcgatactgcagaacctgatcggcgtcggcagcgccggactgctcggcctcgacccgttgctcgggatcatggccggcgcggtctcgctggaaggcggcttcggcgcggcggcggccttcggcccggttgcggaagggctcggcgcccagggcgcgaccaccgtggcgctggcctcggccaccttcggcatggtcgctggcgggctgctcggcagcccggtggcgcgctggctgatcgaacgcaaccgcctgccggtgcaggcggaaagcgacaatcggctggaagccctcggccagcaggagcgacgccagcatgcggcggccacgctggacggcaatctcctgctgcgcctgctgacctgcgtgctgctggtgatggtgctcggcttctggctcggcgacgcgctcgaggaacgcctgggcctggtgctgcccagttatgtcggggcgatgttcatcgccatcgtcctgcgcaacctcgacgaccgtctcggctggctgcgcattccggaccacgccgtcggcaccctgggcgacgtctgcctgggcatcttcctgaccatggcgatgatgagcctgaagttctgggagctggagaacctcggcctgccgctgctcggcgtactgttcatccaggtcgcggtgctgttgctgctgacgatcttcgtgctgttccgcctgctcggccgcaactacgacgccgcggtgctctgcgccggcttcctcggccacggcctgggcgccacgcccaacgcggtggccaacatgggcgcggtctgcgagcactatcgggtgttctcgcacaaggccttcatcatcgtgcccctgtgcggcgcggtactgatcgatctcgtcgccatcccggcgatcacctggttcatcaacgccttcagttga

SEQ ID NO: 6988 - protein, 404 aa, Pseudomonas aeruginosa
  misc_feature (5)..(5): Xaa can be any naturally occurring amino acid
MPTLXLDALSTTALALLLLALGSQLKKRSRWLTRLCVPSPVIAGFGFAFLVWLLRDRGWLDIGLDTSLQTPLMVAFFTTVGLGGSLGLLRKGGKTLLVYLSACWALAILQNLIGVGSAGLLGLDPLLGIMAGAVSLEGGFGAAAAFGPVAEGLGAQGATTVALASATFGMVAGGLLGSPVARWLIERNRLPVQAESDNRLEALGQQERRQHAAATLDGNLLLRLLTCVLLVMVLGFWLGDALEERLGLVLPSYVGAMFIAIVLRNLDDRLGWLRIPDHAVGTLGDVCLGIFLTMAMMSLKFWELENLGLPLLGVLFIQVAVLLLLTIFVLFRLLGRNYDAAVLCAGFLGHGLGATPNAVANMGAVCEHYRVFSHKAFIIVPLCGAVLIDLVAIPAITWFINAFS

SEQ ID NO: 6989 - DNA, 2772 bp, Pseudomonas aeruginosa
  misc_feature (259)..(259): n is a, c, g or t
atgggcgaactggccaaagaaattctcccggtcaatatcgaagacgagctgaaacagtcctatctcgactacgcgatgagcgtgatcgtcgggcgggccctgccggatgcacgtgacggcctgaagccggtgcaccgccgtgtgctttatgccatgagcgagctgggcaacgactggaacaagccctacaagaaatccgcccgtgtggtcggcgacgtgatcggtaagtaccacccgcacggcgacatcgcggtctacnacaccatcgtgcgcatggcgcagccgttctcgctgcgctacatgctggtagacggccagggcaacttcggttcggtggacggcgacaacgccgcagccatgcgatacaccgaagtgcgcatggccaagctggcccatgaactgctggcggatctggaaaaggaaaccgtcgactgggtgcccaactacgatggcaccgagcagatcccggcggtcatgccgaccaagattcccaacctgctggtcaacggttccagcggtatcgccgtgggtatggcgaccaacatcccgccgcacaacctcggcgaagtgatcgacggctgcctggcgctgatggacaaccccgacctgaccgtcgatgagctgatgcagtacatccccggtccggacttccccaccgccggcatcatcaacggccgcgccgggatcatcgaggcctaccgcaccggtcgcgggcgcatctacatccgtgcccgcgccgtcgtcgaggagatggagaagggcggcggtcgcgagcagatcatcatcaccgagctgccgtaccagttgaacaaggcgcggttgatcgaaaagatcgccgagctggtgaaagagaagaagatcgagggtatttccgagctgcgcgacgagtccgacaaggacggcatgcgcgtggtcatcgagctgcgtcgcggcgaggtgggcgaggtggtcctcaacaacctctatgcccagacccagctgcagagcgtgttcggcatcaacgtggtggccctggtcgacggccagccgcgcacgctgaacctgaaggacatgctcgaggtgttcgtccgccaccgccgcgaagtggtgacccggcgtaccgtctacgagctgcgcaaggcccgcgagcgcgggcacatcctggaaggccaggcggtcgctctgtcgaacatcgacccggtgatcgagctgatcaagagttcgccgaccccggccgaggccaaggaacgcctgatcgccactgcctgggagtccagcgcggtggaagcgatggtcgagcgtgccggcgccgacgcctgtcgcccggaagacctggatccgcagtacggcctgcgcgacggcaagtactacctgtcgccggaacaggcccaggcgatcctcgagctgcgcctgcatcgcctgaccggcctggagcacgagaagctgctctccgaataccaggaaatcctcaacctgatcggcgagttgatccgcatcctgaccaacccggcgcgcctgatggaggtgatccgtgaggagctggaagcggtcaaggccgaattcggcgatgctcgccgcaccgagatcgtggcttcccaggtcgacctgaccatcgccgacctgatcaccgaggaagaccgcgtggtgaccatctcccacggcggctacgccaagtcccagccgctggccgcctaccaggcgcagcgtcgcggcggcaaaggcaagtccgccaccgggatgaaggacgaggactacatcgaacacctgctggtggccaacagccatgcgaccctcctgctgttctccagcaagggcaaggtctactggctgcgtaccttcgagattccggaagcctcgcgtaccgcgcgtggccggccgttggtgaacctgctgccgctggacgagggcgagcggatcaccgcgatgttgcagatcgacctggaggcgctgcagcagaacggcggcgccgatgacgacctcgacgaagccgaaggagcggtgctcgagggcgaggtggtcgaggccgccgaggtcgaggaagtcgagggcgagaccgccgagctggtggccgagccgaccggcgcctacatcttcatggccaccgccttcggtaccgtgaagaagaccccgctggtgcagttcagccgtccgcgcagcagcggcctgatcgcgctcaagctggaagagggcgacaccctgatcgccgccgcgatcaccgatggcgccaaggaagtcatgctgttctccagcgccggcaaggtgatccgcttcgccgagagcgtggtgcgcatcatgggccgcaacgcccgcggcgtacgtggcatgcgcctgggcaaggggcagcagctgatctccatgctgattccggagtccggggcgcagatcctcaccgcctccgagcgcggcttcggcaagcgtaccccgctgagcaagttcccgcgtcgcggccgcggcggccagggggtgatcgccatggtcaccaacgagcgcaacggcgcgctgatcgccgcggtacaggtccaggaaggcgaggagatcatgctgatttccgaccagggcaccctggtgcggacgcgtgtcgacgaagtctccctgtccggccgcaatacccagggcgtaaccctgatcaagctcgccagcgacgaggtactggtcggtctggagcgtgtccaggagccgtcgggcggagatgacgaggacctgcccgagggcgaggaagctgccgaatctctgggcgagtcggccgagtccgagtccgagcccgcggcggaagcggaaggcaacgaagagtaa

SEQ ID NO: 6990 - protein, 923 aa, Pseudomonas aeruginosa
  misc_feature (87)..(87): Xaa can be any naturally occurring amino acid
MGELAKEILPVNIEDELKQSYLDYAMSVIVGRALPDARDGLKPVHRRVLYAMSELGNDWNKPYKKSARVVGDVIGKYHPHGDIAVYXTIVRMAQPFSLRYMLVDGQGNFGSVDGDNAAAMRYTEVRMAKLAHELLADLEKETVDWVPNYDGTEQIPAVMPTKIPNLLVNGSSGIAVGMATNIPPHNLGEVIDGCLALMDNPDLTVDELMQYIPGPDFPTAGIINGRAGIIEAYRTGRGRIYIRARAVVEEMEKGGGREQIIITELPYQLNKARLIEKIAELVKEKKIEGISELRDESDKDGMRVVIELRRGEVGEVVLNNLYAQTQLQSVFGINVVALVDGQPRTLNLKDMLEVFVRHRREVVTRRTVYELRKARERGHILEGQAVALSNIDPVIELIKSSPTPAEAKERLIATAWESSAVEAMVERAGADACRPEDLDPQYGLRDGKYYLSPEQAQAILELRLHRLTGLEHEKLLSEYQEILNLIGELIRILTNPARLMEVIREELEAVKAEFGDARRTEIVASQVDLTIADLITEEDRVVTISHGGYAKSQPLAAYQAQRRGGKGKSATGMKDEDYIEHLLVANSHATLLLFSSKGKVYWLRTFEIPEASRTARGRPLVNLLPLDEGERITAMLQIDLEALQQNGGADDDLDEAEGAVLEGEVVEAAEVEEVEGETAELVAEPTGAYIFMATAFGTVKKTPLVQFSRPRSSGLIALKLEEGDTLIAAAITDGAKEVMLFSSAGKVIRFAESVVRIMGRNARGVRGMRLGKGQQLISMLIPESGAQILTASERGFGKRTPLSKFPRRGRGGQGVIAMVTNERNGALIAAVQVQEGEEIMLISDQGTLVRTRVDEVSLSGRNTQGVTLIKLASDEVLVGLERVQEPSGGDDEDLPEGEEAAESLGESAESESEPAAEAEGNEE

SEQ ID NO: 6991 - DNA, 2772 bp, Pseudomonas aeruginosa
  misc_feature (248)..(248): n is a, c, g or t
atgggcgaactggccaaagaaattctcccggtcaatatcgaagacgagctgaaacagtcctatctcgactacgcgatgagcgtgatcgtcgggcgggccctgccggatgcacgtgacggcctgaagccggtgcaccgccgtgtgctttatgccatgagcgagctgggcaacgactggaacaagccctacaagaaatccgcccgtgtggtcggcgacgtgatcggtaagtaccacccgcacggcgacancgcggtctacgacaccatcgtgcgcatggcgcagccgttctcgctgcgctacatgctggtagacggccagggcaacttcggttcggtggacggcgacaacgccgcagccatgcgatacaccgaagtgcgcatggccaagctggcccatgaactgctggcggatctggaaaaggaaaccgtcgactgggtgcccaactacgatggcaccgagcagatcccggcggtcatgccgaccaagattcccaacctgctggtcaacggttccagcggtatcgccgtgggtatggcgaccaacatcccgccgcacaacctcggcgaagtgatcgacggctgcctggcgctgatggacaaccccgacctgaccgtcgatgagctgatgcagtacatccccggtccggacttccccaccgccggcatcatcaacggccgcgccgggatcatcgaggcctaccgcaccggtcgcgggcgcatctacatccgtgcccgcgccgtcgtcgaggagatggagaagggcggcggtcgcgagcagatcatcatcaccgagctgccgtaccagttgaacaaggcgcggttgatcgaaaagatcgccgagctggtgaaagagaagaagatcgagggtatttccgagctgcgcgacgagtccgacaaggacggcatgcgcgtggtcatcgagctgcgtcgcggcgaggtgggcgaggtggtcctcaacaacctctatgcccagacccagctgcagagcgtgttcggcatcaacgtggtggccctggtcgacggccagccgcgcacgctgaacctgaaggacatgctcgaggtgttcgtccgccaccgccgcgaagtggtgacccggcgtaccgtctacgagctgcgcaaggcccgcgagcgcgggcacatcctggaaggccaggcggtcgctctgtcgaacatcgacccggtgatcgagctgatcaagagttcgccgaccccggccgaggccaaggaacgcctgatcgccactgcctgggagtccagcgcggtggaagcgatggtcgagcgtgccggcgccgacgcctgtcgcccggaagacctggatccgcagtacggcctgcgcgacggcaagtactacctgtcgccggaacaggcccaggcgatcctcgagctgcgcctgcatcgcctgaccggcctggagcacgagaagctgctctccgaataccaggaaatcctcaacctgatcggcgagttgatccgcatcctgaccaacccggcgcgcctgatggaggtgatccgtgaggagctggaagcggtcaaggccgaattcggcgatgctcgccgcaccgagatcgtggcttcccaggtcgacctgaccatcgccgacctgatcaccgaggaagaccgcgtggtgaccatctcccacggcggctacgccaagtcccagccgctggccgcctaccaggcgcagcgtcgcggcggcaaaggcaagtccgccaccgggatgaaggacgaggactacatcgaacacctgctggtggccaacagccatgcgaccctcctgctgttctccagcaagggcaaggtctactggctgcgtaccttcgagattccggaagcctcgcgtaccgcgcgtggccggccgttggtgaacctgctgccgctggacgagggcgagcggatcaccgcgatgttgcagatcgacctggaggcgctgcagcagaacggcggcgccgatgacgacctcgacgaagccgaaggagcggtgctcgagggcgaggtggtcgaggccgccgaggtcgaggaagtcgagggcgagaccgccgagctggtggccgagccgaccggcgcctacatcttcatggccaccgccttcggtaccgtgaagaagaccccgctggtgcagttcagccgtccgcgcagcagcggcctgatcgcgctcaagctggaagagggcgacaccctgatcgccgccgcgatcaccgatggcgccaaggaagtcatgctgttctccagcgccggcaaggtgatccgcttcgccgagagcgtggtgcgcatcatgggccgcaacgcccgcggcgtacgtggcatgcgcctgggcaaggggcagcagctgatctccatgctgattccggagtccggggcgcagatcctcaccgcctccgagcgcggcttcggcaagcgtaccccgctgagcaagttcccgcgtcgcggccgcggcggccagggggtgatcgccatggtcaccaacgagcgcaacggcgcgctgatcgccgcggtacaggtccaggaaggcgaggagatcatgctgatttccgaccagggcaccctggtgcggacgcgtgtcgacgaagtctccctgtccggccgcaatacccagggcgtaaccctgatcaagctcgccagcgacgaggtactggtcggtctggagcgtgtccaggagccgtcgggcggagatgacgaggacctgcccgagggcgaggaagctgccgaatctctgggcgagtcggccgagtccgagtccgagcccgcggcggaagcggaaggcaacgaagagtaa

SEQ ID NO: 6992 - protein, 923 aa, Pseudomonas aeruginosa
  misc_feature (83)..(83): Xaa can be any naturally occurring amino acid
MGELAKEILPVNIEDELKQSYLDYAMSVIVGRALPDARDGLKPVHRRVLYAMSELGNDWNKPYKKSARVVGDVIGKYHPHGDXAVYDTIVRMAQPFSLRYMLVDGQGNFGSVDGDNAAAMRYTEVRMAKLAHELLADLEKETVDWVPNYDGTEQIPAVMPTKIPNLLVNGSSGIAVGMATNIPPHNLGEVIDGCLALMDNPDLTVDELMQYIPGPDFPTAGIINGRAGIIEAYRTGRGRIYIRARAVVEEMEKGGGREQIIITELPYQLNKARLIEKIAELVKEKKIEGISELRDESDKDGMRVVIELRRGEVGEVVLNNLYAQTQLQSVFGINVVALVDGQPRTLNLKDMLEVFVRHRREVVTRRTVYELRKARERGHILEGQAVALSNIDPVIELIKSSPTPAEAKERLIATAWESSAVEAMVERAGADACRPEDLDPQYGLRDGKYYLSPEQAQAILELRLHRLTGLEHEKLLSEYQEILNLIGELIRILTNPARLMEVIREELEAVKAEFGDARRTEIVASQVDLTIADLITEEDRVVTISHGGYAKSQPLAAYQAQRRGGKGKSATGMKDEDYIEHLLVANSHATLLLFSSKGKVYWLRTFEIPEASRTARGRPLVNLLPLDEGERITAMLQIDLEALQQNGGADDDLDEAEGAVLEGEVVEAAEVEEVEGETAELVAEPTGAYIFMATAFGTVKKTPLVQFSRPRSSGLIALKLEEGDTLIAAAITDGAKEVMLFSSAGKVIRFAESVVRIMGRNARGVRGMRLGKGQQLISMLIPESGAQILTASERGFGKRTPLSKFPRRGRGGQGVIAMVTNERNGALIAAVQVQEGEEIMLISDQGTLVRTRVDEVSLSGRNTQGVTLIKLASDEVLVGLERVQEPSGGDDEDLPEGEEAAESLGESAESESEPAAEAEGNEE

SEQ ID NO: 6993 - DNA, 960 bp, Pseudomonas aeruginosa
  misc_feature (566)..(566): n is a, c, g or t
atgtctcgtccgttcctgcgtcgcttggccatcgtgtttgccgcttccgtcgtcctgtcgggcattggtggcgcacaggccgaggaggtcctgcgcatcggcttccagaaatcctcgactctgctgaccctgatccgcagccagggcaccttcgagcgcgagttggccaggcagggcatccgggtgtcctggcatgagttccccagcggcctgccgttgctcgaatcgctcaatgtcggcaacgtcgatctctccgccgacgtcgccgacaccgtgccggtgttcgcccaggcggcgggtgctcgcctgacctacttcgcccgcgaaacaccttcgcccgcggcgcaggcgatactggtcggcgaacattcgccgctgaagtccctggccgagctgaagggcaagcgcatcgccgtgaccaaggccgccggcagccactacctgctgatcgccgcgctggccagcgccgggcttgagttctccgacatccagccagcctacctgacgccagccgacggccgcgccgccttcgagaacggcaaggtcgacgcctgggtgacctgggncccctacgtggcaagcgcccagcgccagcaacgcgcgcgggtactggccgacggccagggcctggccagctaccagcgctactacctcgcctccagcgactacgccaggaaacatcctgaagtgctccagcaggtcttcgccgaactgcagcgcaccgggcgctggctcaagagccacccggccgacgcggccaaggtgctggggccgctgtggggcaatctcgatgccgctaccgtcgagcaggcgaatgcgcggcgcagctacgacgtacaaccggtgagcgcagatggtctcgacgagcaacagcgcatcgccgacgccttccacgcccagggactgctacccaaaccggtggatgcgcgcgccgtggaggtatggcagccgcggcactga

SEQ ID NO: 6994 - protein, 319 aa, Pseudomonas aeruginosa
  misc_feature (189)..(189): Xaa can be any naturally occurring amino acid
MSRPFLRRLAIVFAASVVLSGIGGAQAEEVLRIGFQKSSTLLTLIRSQGTFERELARQGIRVSWHEFPSGLPLLESLNVGNVDLSADVADTVPVFAQAAGARLTYFARETPSPAAQAILVGEHSPLKSLAELKGKRIAVTKAAGSHYLLIAALASAGLEFSDIQPAYLTPADGRAAFENGKVDAWVTWXPYVASAQRQQRARVLADGQGLASYQRYYLASSDYARKHPEVLQQVFAELQRTGRWLKSHPADAAKVLGPLWGNLDAATVEQANARRSYDVQPVSADGLDEQQRIADAFHAQGLLPKPVDARAVEVWQPRH

SEQ ID NO: 6995 - DNA, 672 bp, Salmonella enterica
  misc_feature (176)..(176): n is a, c, g or t
atgcagtacccgattaacgagatgttccagactctacaaggcgagggttattttaccggcgtccccgctatttttattcgtttacagggatgtccggtcggctgtgcctggtgtgatactaagcatacctgggataaactgagcgatcgggaagtgtctctgttcagcattctggnaaaaaccaaagagagcgacaaatggggtgctgcgagcagtgaagacttgctggcagtaattaaccgtcagggctataccgcgcgtcacgttgtcatcaccggtggcgaaccctgtattcacgacctcatgccgctcaccgatctgcttgaaaagagtggttttagttgccagattgaaaccagcgggacgcatgaagtgcgctgtacgcctaacacctgggtcacggtttcaccaaaagtgaatatgcgcgggggatatgacgtgctttcccaggcgctggagcgcgccaatgaaatcaagcatcccgttgggcgagttcgtgatattgaggcgctggatgaactgttagccacgttgagcgatgataaaccgcgcgtgattgctttgcagcccattagccagaaagaagacgcgacgcgtctgtgtattgaaacgtgtattgcacgtaactggcggctgtctatgcaaacgcataaatatttaaatatcgcctga

SEQ ID NO: 6996 - protein, 223 aa, Salmonella enterica
  misc_feature (59)..(59): Xaa can be any naturally occurring amino acid
MQYPINEMFQTLQGEGYFTGVPAIFIRLQGCPVGCAWCDTKHTWDKLSDREVSLFSILXKTKESDKWGAASSEDLLAVINRQGYTARHVVITGGEPCIHDLMPLTDLLEKSGFSCQIETSGTHEVRCTPNTWVTVSPKVNMRGGYDVLSQALERANEIKHPVGRVRDIEALDELLATLSDDKPRVIALQPISQKEDATRLCIETCIARNWRLSMQTHKYLNIA

SEQ ID NO: 6997 - DNA, 11475 bp, Salmonella enterica
  misc_feature (7861)..(7861): n is a, c, g or t
atgcgtctactcgccgtggtttcgaaattgactggcgtctccaccactgtggaatcctcagcggtcactcttaacgccccgtcaattgttaaattatcagtggcccgggaggaaattagtcaacttacgcgcattaatcaggatctggtggtgacgctccattccggcgaaacgatcacgattaaaaacttttacgttaccaacgatctgggcgcaagccagctggtactggcggaaaacgatggcacgttatggtgggtagaaaatccgcaagccgggctacattttgaacaaatcgctgatattaatgaactgctggtcacttccggcgcttcccatgaagcaggcggcgccgtttggccgtgggtactggctggcgcggtggcggctggcggcattgccgctatcgcgtcttccggcggcggcgattcccaccatcattcggatggcgataatccgccccccgataacaccaatcctgacggtaatccccctgataacagcaatcccggcggcagtacccccaacggcaatactccaggtagcagtaatcctgtagatactaccccgcctctcgctcccggcgaattattgatttcagcggacggaaaaacggtaagcgggcaagccgaagcgggcagtaccattaccatcaaagatccctcaggcaacgtcgttggcgagggcaaagcggatagcgacggtaaatttagtattgatctgacagcaccacagattagcggcgaacaacttaccgtgaccgcgactgacgatgccggcaataccggcccatccgcaaccatcgatgcgcccaacattcctctccccgatacaccagctatcaccgccgctatcgatgatgccgctcccctcaccagcacgctgagcaataaccagtttacgaacgacaatacccccactctggagggcaccggcagcgcaggcacagtcatccatatttacgccaatggtcaggaaataggctcaacaacggttgataccagcggaaactggcattttgccattaccagcgcgctagcggatggggaaaatcatttcaccgccattgcgactaacgtgaaaggcgaaagtagcgaatcagcccgctttacgctgactatcgacacactcatccccgatgccccacgtgttgaactgattgccgataacaccggtttgctcaccgggccgctacagaataatgaccgaactgacgaggcaaaaccgctattttccgggcagggagaggcaggcaataccatcacgattaaagagggttcaaccgttatcggcagcgctaccgtagacgaaaatggacgctggacctttacgccgactacgccgttaagcgatggcgaacatacctttaccgtcgaacaaagcgacaaagccggaaacacgagccgcgtgacgacaacgcctactatcattgtggacaccacgccgcctgacgccgctatcattgataatgttgcgaaagacggcacaaccgttagcggcaccgctgaagctggcagtactgtgtcgatctatgacccggcgggaaattacctgggctccacgattaccggagaaaataaccacttcagcatcacgctgaatccggctcagacccacggcgagcgtctggaagcgcgtattcaggacgccgtcggtaacatcggccccgccacggagtttaccgcttctgactcacagtatcctgcccagccgactatccttaccgtgacggatgacgctggcgccgttaccgggctgctgaaaaatggcgatgccacagatgataaccgcccaaccctcagcggtactgctgaaccaggcagtacgatatcgattaacgataatggctttcctgtagcgacctttccgcccattgtcgctgacgctgacggcaaatggagctttaccccctcgctggcgcttgccgatggcgaccatgtctttaccgctaccgcgaccaacgatcgcggcaccagcgggcagtccgtctcctttaccattgatatcgacacgcagccgccggtgctggaaggcctggcggttagcgacgtcggcgacagactcaccggcactacggaagctggcagtactgtggttatcaaagacagcctgggaaatacgctcgggagtggaacggcaggcgacgacggtaccttctcaataggtattagcccggcgaaaattaacggcgaaacattaagcattagcgttaccgataaagccgcgaatagcggtccggtagaaacgctgaacgcgccggataaaactgcgcctgcggcaccggacggtcttaccgtggcgaccgacggtctgtccgtaagcggtcaggcggaagccggggcaacggtcactatccgcgacagtagcaacaccgtacttggcagcgccgtcgctaatggcaacggacaatttatcgttccgctgaatacggcgcagactaacggccaggcgcttatcgctaccgccaccgatgtcgcgaaaaacgaaagcgccgccgcgacggttatcgcgccggacagtaccgcgccggaaatgccgaaaaacgtggtaattagtgaggatggcaccagtatcagcggcaccgccgaaccgggtagcgccatcacgatcgccacgccggacggcaagccgcttggcagcggcaaagcagatggcgaaggtcattttacccttcccctcgtccccgcacagaccaacggcgaacaggttaccgtcaccgccaccgacagcgccaacaacgtcagcccgccaaccacagcgcaagcgcccgatatcaccgccccggataagcccattatcactcaggtactggacgatgttgaaagcttcaccgggccgctggttaacggacaaaccaccaacgacaaccgtcccacccttagcggtacggcggaggccggcgcgcgtgtcgaagtctttgataacggcgtttcactgggactcgccacgctacagcccaacggtgcctggacgtttacgccgtcgcaaaatttaggtgaaggcgcgcatcgactgaccgtaatcgcaaccgacgctaaaggcaatgccagtcaggccgcgtcattcgacctggtggtcgatacgcaatcgccgcagcaaccggtaatcaccttcattacagatgatgcgccgggtattctcggtagcgtcgcgcatctggggctcactaacgacagcacgccaacgattaatggtacaggtgaaccgggttccacagtacacctgtatcagaatggcgcccggatagcagatattatcgtcggtaattccggcgtctggagctacgcttacaccacggcctcgccactggcggacgacacctacacctttaccgtgacggccagcgacagtaacggcaacaccacgcctttttcgaccgattttacgattaccattgatacccaggcccctgccgcccccggcgttatcggcgtagctgacggcgacggaaatacgattgataccaatcagattacccaggaatcccagccccggttgagcggtagcggcaccgcaggcgacacaatcatcctttacgataatggcaatgccataggtcaggcgctggtcggcacggacgggcgctggcagtttacgccgcctgccgcgctgggcgacggcgaccaccatctgaccgctcgcgccaacgatccggcggggaacgaaagtcccgaatccatcagctttaccctacgcatcgatacccaggcgccggatgcgccgcagatcgtgtcagccgccatcaccggcggagaaggcgaggtgctactggcaaacggcagtattaccaatcagcgtatgccgaccctcagcggcaccggcgaacccggcaccatcatcaccctgtacaataacggcgtagaactggctaccgtccaggtcaatccacagggtagctggacctatccgctaacccgtaatctgagcgaagggttaaacatcctgacggccaccgccacggatgccgcaggcaatagtagcccgacctccggcgttttctccgttacccttgatacccagcctccagcgcagcctgacgcgccgctaatcagcgataacgtcgcgccggttattggcaacatcggcaataatggcgcaacgaacgataccacgccgaccttcagcggcacgggagagatcggcagcacgataattctctacaataatggcagtgaaattggtcgcacaacggtaggcgataacggtagctggaactttacgcctgcggcactgacgccagaaacctataccattaccgtcacggaaaccgatagagcgggcaatatcagtccaccttccgcctcagtcacttttacgctagacaccactgcgcccgccaatccggttatcacttttgccgaagataacgtcggcgaagtccaggatactattgtcagcggcgcaaccactgacgacaatacaccggtcattcacggcactggcgacatcggcagcattattacgctctataatggcagcagcgttttaggcgtagtcaccgtcgatgagaccggcacctggacgctagcggtgaccagcgcgctgccggatggcgtctacaccctgactgccattgccgccgatgccgccggaaacagcagcggcgtatcgaacagctttaccttcaccgtcgacaccgttccgttgcagccgcccgtcgtcaatgaaatccttgacgatgttgcgccagtgaccgggccattaaccgatggcgcctttactaacgatcggacgctgactattaacggcagcggcgaaaacggcagcaccgtcacgatttacgacaatggcgtggcaatcgggacggcgctcgtcaccgacggggtctggacattcaatacgcccgaattatcagaagccagccatgcgctaaccttcagcgcgactgacgatgctggaaataccacggcgcaaacccagccgatcactattaccgtggatatcactgccccgcccgcgccaacgatccagacggtggacgacgatggcacgcgcgtcgccggacttgccgatccttacgctaccgttgaaattcaccatgccgatggcaccctggtcggcagcgctgtcgctaatggcaccggtgaattcgtcgttacgctcagtccggcgcaaaccgatggcggtacgctgacggcaattgctatcgatcgcgcggggaataacggcccggctacgaattttcccgcttccgacagcggtctgcccgccgtcccggccatcacggcgattgaagatgatgtcgggagcgtacaggggaatattgcggcgggcggcgccacggacgacaccatgccgacgctgcgcggcaccacggatatcggctctaccgttgaagttttcattgatggcgattcggcaggctttgccaccgttgacgccagcgggaactggatctttgagatcgcgacgccattaagcgaaagcacacattacttcaccgtccaggcaaccaatgcgaatggcccgggcggcctgtccgcaccggtcgggatcactgtcgatcttagcgcgccggcgcaaccggttattaccagcgcaacggatgatgtccccggcatgaccggtacgctggataacggcgcgctcaccaatgattcacgcccgacgctcaacggaacgggagaagctggcgccacgatccgcattctggataacggcgtagaaatcggttccgccacggtagatcaaagcggcaactggcgcttcaccccgaacgcgccgctagagagcaacgcgcacatctttaccgccgtggcgaccgatcccgctggcaatagcggccagccttcggacggctttacgctgaacattgacgcgcaggcgccagatgtgccggttatcacgtccgtgattgacgataacaatcaaccgaccgttccggtgttaccggggcaatccaccgacgatcggcagccaatactgaacggaactggcgaacctggcgcgacaatcaccatttttgataacggtacgccgcttggcacggctcaggtaggcgaaaacggtagctggaccttcccggtgccccgcaatttgtcagagggaagccataatctgacggttagcgctaccgatccggcgggcaataccagcgcggtctccgcgccgtggacgatcgtggtcgatattacgcctccggcgatcccggttctcacctccgtcgtggatgaccagcccggaattaccggcaacctggttagcgggcagctaacgaacgatgcgacgcccaccctgaacgggcgcggagaggcaggcgcgacgattaatgtctatcttgacggtaatcccgcgtccatcggtaccacgacggtgaatagcgacggcacgtggagtttcacgccgcagacgccgcttgcaaacggtagccacacgttcacccttagcgccaccgatccggcgggtaatagcagctcggtgtccagcggatttgtgctgacgattgacgccacaccgcccgccgcgccggttatcgccagcgtggcagataatacggcgccggtaacgggcatcgtccccaacggcggctcgacgaacgaaacccgaccaacactctcgggtaccggtgaggcgggtacaaccatctcgatttataatggcagcgcgctggtcggtacggcgcaagttcaggccaacggtagctggagctttacaccgtctacctcgctgggcgcgggcgtctggaacctgacggcgacagcaaccgatgcggcaggcaataccagcgccgcgtccgaaatacgctcgtttactattgataccacggctcccgccgcgcctgttattgatacggtctacgacggtacgggccccattaccggcaatctgagttcaggacagatcacagacgaggcgcgccctgtcattagcggcacccgtgaagccaacacaactattcgtctctacgataacggcacgctgctggctgaaattcccgccgacaatagcagtagctggcgctacacgcccgacgcctcgctggcgacgggcaaccatgtaattaccgtcattgccgttgatgccgcaggcaacgccagccccgtttcggacagcgttaatttcgtcgtcgatactacgccgccgctgacgccggtaatcacatcagtcagtgacgatcaggcgccaggcctcggcacgatcgcgaacggccaaaataccaacgatcctacgccaaccttcagcggcaccgcagaagccggcgccacgatcacgctctatgaaaatggtacggtcattggcacgacaacggctcagcctgacggcgcgtggagcgtctccacctcaacgctggcaagcggaacgcacgtcatcaccgccgtcgccaccgatgccgcaggaaacagcagcccgaacagtacggctttcaccctgacggtcgataccaccgcgccgcaaacgccaatcctgacgtccgtggtggatgacgtcgcgggtggggtcacaggaaatctcgctaatggtcagataaccaatgataaccgccccacgctgaacggcactgccgaagcgggcagcgtggtcagtatctatgatggcgacactctgcttggcgtcacctcggctaacgcgagcggcgcgtggagcttcacgccgacgacagggttaaacgacggcacgcgcacattaacagtgaccgccaccgacccggcaggcaacgttagcccggccaccagcggttttactatcgtggtcgatacccttgcgccaacggttccgcttataaccagcatcgttgatgatgtcccgaacaataccggcgccattggcaatggacaatcgaccaacgacacacagccgacgctcaacggtactgcggaagccaacagcgcggtaagcatcttcgataatagcgcgctggtcncgaccgtgaacgccaatgccagcggcaactggagctggacgccaaccgccgcgctcggccagggaagtcacgcctatagcgttagcgccgccgatgcggctggcaacgttagcgccgcttcgccatcgataacgattatcgtggataccattgcgcccggcgcgcccggcaacctggtcatcaatgctaccggtaatcgggtgacgggcaccgcggaagcaggcagtacagtgacgattacctctgatactggtgtggtactgggaaccgccaccgccgacggtacaggcagcttcaccgccacactcacgcccgcgcagaccaatggtcagccgctactggcatttgcccaggataaagcaggcaacacaggcattgccgccggatttaccgcgcccgatacgcgtgtgccggaagcaccgatcatcaccaacgtagtagatgatgtgggtatttataccggcgctatcgccaacggccaggtcactaatgacgcacaacccacattgaatggtaccgctcaggcgggcgccacggtgagcatttataacaacggggcgctgctcggcaccaccacggcgaacgccagcggaaactggagctttaccccgacaggcaatttgaccgaaggcagccacgccttcaccgccaccgcgactaacgccaacggtacaggcagcgtctccaccgccgcgacggtgattgtcgatacgctggcgcccggtacgccgtcaggtacgctcagcgccgatggcggttcactttccgggctggcagaggcaaacagcaccgtaaccgtcacgctgacggggggcgtgacgctcaccaccaccgctggcagcaacggcgcatggtctctcaccttgccgacaaaacaaattgaaggtcagctcattaacgtgacggccactgacgctgcgggtaacgcctccggcacgttaggcattaccgcgccggttctgccgctggcggcaagggataacatcaccagccttgatctgacctctaccgccgtcaccagcacgcaaagctattcggattacggcctgctgctggttggcgcgcttggcaatgtcgcctcggttttgggtaacgataccgctcaggttgagttcaccattgctgaaggtggtacgggcgacgtcaccatcgatgccgccgcaacgggaatcgtgctttcgctgctcagtactcaggagattgtggtacagcgctacgacaccagcctcggcgcctggacgacgatcgtcaacaccgccgttggcgacttcgcgaatttgcttaccctgaccgggagcggcgttaccctgaacctgagcggcctgggcgaaggccagtaccgggtactcacttataacaccagtctgctcgccaccgggtcatataccagcctggatgtcgatgtacaccagaccagcgcaggtattattagcgggccaaccatcagtaccggcaacgtcatggctgatgataccgcgccgacgggcaccacggtcaccgccatcaccaacgccaacggcgtcagtacgccggtcggcgcgggcggcgtggatatccagggacaatacggcacgctgcacattaatcaggacggcagttacacctacacgctggctaagcccacggcaggatacggacataaagagagcttcacctacaccattacccagaatggcgtcggtagcagcgccgcgcaactggttatcaatctgggtcccgcgcctgtaccgggcagcgtgatagcgacagacaataacgcctcgctggtctttgatactcacgttagctacgtcaacaacggtccctcgacacaaagcggcgtcacggtattaagcgtcggacttggtaatgtactgaacgcgaatctgcttgatgatatgactaatccgatcatctttaacgttgaagaaggcgctacgcgaaccatgacgttacagggaaccgtcggcggcgtctcactggtttccacgttcgatctgtacgtttatcgcttcaacgatgccattcagcaatatgagcagttccgggtggaaaagggctggattaacaccctgctgttagccggacagtcccagccgctgaccctgacgttgcctggcggcgaatacctgttcgtgctgaataccgccagcggcattagcgtcctcactggctatacgttggcgatttcccaggaccacacctatgccgttgacagtatcaccgccaacaccaccggcaacgtactgaccaatgatgtcgtccctacggacgccctcctcactgaagtaaacggcgtggcgattgcggcgaccggcacaacggaggtaaacgggctgtatggctcgctcatcattgacgcaagaggcaactatacctacacgctgaagaacggcgtcggcgccgacagcattaaaacgccggacagctttatctatacggtcaaagcgccaaacggcgataccgatacggcctcgctcaatatcacgccaaccgccagggcgctggatgcgattaatgatgtcagcgataccctcagcgtcgccacgcttcaggataccgctgcctggctggactccagcgtcggcagcgccagttgggggctactcggcaaatcgggcagcgggagcggcacctttgacgttgcaacgggcaccgtacttaaaggcgcgtcactggtctttgatgtctccacgctcattacgctgggcaatctgaatattagctgggccattcaggagaacgggaccgtcatacgcaacggaaccgttccggtggcgaatatcacgctgggcagcgcgacggtgaccgtcaacctgagcggtctggagctggatgccggaacgtacacgcttaactttaccggcaccaataccctggccggggcggcgacgatcacgccacgcgtcatcggcaccaccgtcgatctggataattttgaaacgtccggaacgcataccgttctcggcaatatttttgacggcagcgacgcggcgggggcgatggatcagcttaatacggtgaatacccgcctgagcattagcgggtataacggcagcgccgccacgctggacgccgcggcgaataccaccagcgccacgattcagggacattacggcacattgcaaattaacctcgatggcgcttacacctacaccctgaataatggcgtcgcgatgtcgtccatcaccagtaaagaggtctttacctatcaactggatgacaagatgggtcatacggatagcgccacattgaccattgatatggcgccacaaatcgtcagtaccaaccaaaacgatgttctcatcggctccgcctatggcgatacgctgatttaccatctgttaaacggcgcggacgcgaccggcggcaacggcgtcgatcgctggcaaaacttctctaccgcgcagggcgacaagatcgatatccacgaactgctgaccggctgggatcaccaggcggcgacgctgggtaactttgtgcaggttcataccagcggcgccaatacggtgatatccgtcgatcgcgacggcgccggcagtgcgtttaaatccactgaccttgtcactctggagaatgtgcagctcacgctaaatgatctgttgcagaacaaccacctgataaccggcggttga

SEQ ID NO: 6998 - protein, 3824 aa, Salmonella enterica
  misc_feature (2621)..(2621): Xaa can be any naturally occurring amino acid
MRLLAVVSKLTGVSTTVESSAVTLNAPSIVKLSVAREEISQLTRINQDLVVTLHSGETITIKNFYVTNDLGASQLVLAENDGTLWWVENPQAGLHFEQIADINELLVTSGASHEAGGAVWPWVLAGAVAAGGIAAIASSGGGDSHHHSDGDNPPPDNTNPDGNPPDNSNPGGSTPNGNTPGSSNPVDTTPPLAPGELLISADGKTVSGQAEAGSTITIKDPSGNVVGEGKADSDGKFSIDLTAPQISGEQLTVTATDDAGNTGPSATIDAPNIPLPDTPAITAAIDDAAPLTSTLSNNQFTNDNTPTLEGTGSAGTVIHIYANGQEIGSTTVDTSGNWHFAITSALADGENHFTAIATNVKGESSESARFTLTIDTLIPDAPRVELIADNTGLLTGPLQNNDRTDEAKPLFSGQGEAGNTITIKEGSTVIGSATVDENGRWTFTPTTPLSDGEHTFTVEQSDKAGNTSRVTTTPTIIVDTTPPDAAIIDNVAKDGTTVSGTAEAGSTVSIYDPAGNYLGSTITGENNHFSITLNPAQTHGERLEARIQDAVGNIGPATEFTASDSQYPAQPTILTVTDDAGAVTGLLKNGDATDDNRPTLSGTAEPGSTISINDNGFPVATFPPIVADADGKWSFTPSLALADGDHVFTATATNDRGTSGQSVSFTIDIDTQPPVLEGLAVSDVGDRLTGTTEAGSTVVIKDSLGNTLGSGTAGDDGTFSIGISPAKINGETLSISVTDKAANSGPVETLNAPDKTAPAAPDGLTVATDGLSVSGQAEAGATVTIRDSSNTVLGSAVANGNGQFIVPLNTAQTNGQALIATATDVAKNESAAATVIAPDSTAPEMPKNVVISEDGTSISGTAEPGSAITIATPDGKPLGSGKADGEGHFTLPLVPAQTNGEQVTVTATDSANNVSPPTTAQAPDITAPDKPIITQVLDDVESFTGPLVNGQTTNDNRPTLSGTAEAGARVEVFDNGVSLGLATLQPNGAWTFTPSQNLGEGAHRLTVIATDAKGNASQAASFDLVVDTQSPQQPVITFITDDAPGILGSVAHLGLTNDSTPTINGTGEPGSTVHLYQNGARIADIIVGNSGVWSYAYTTASPLADDTYTFTVTASDSNGNTTPFSTDFTITIDTQAPAAPGVIGVADGDGNTIDTNQITQESQPRLSGSGTAGDTIILYDNGNAIGQALVGTDGRWQFTPPAALGDGDHHLTARANDPAGNESPESISFTLRIDTQAPDAPQIVSAAITGGEGEVLLANGSITNQRMPTLSGTGEPGTIITLYNNGVELATVQVNPQGSWTYPLTRNLSEGLNILTATATDAAGNSSPTSGVFSVTLDTQPPAQPDAPLISDNVAPVIGNIGNNGATNDTTPTFSGTGEIGSTIILYNNGSEIGRTTVGDNGSWNFTPAALTPETYTITVTETDRAGNISPPSASVTFTLDTTAPANPVITFAEDNVGEVQDTIVSGATTDDNTPVIHGTGDIGSIITLYNGSSVLGVVTVDETGTWTLAVTSALPDGVYTLTAIAADAAGNSSGVSNSFTFTVDTVPLQPPVVNEILDDVAPVTGPLTDGAFTNDRTLTINGSGENGSTVTIYDNGVAIGTALVTDGVWTFNTPELSEASHALTFSATDDAGNTTAQTQPITITVDITAPPAPTIQTVDDDGTRVAGLADPYATVEIHHADGTLVGSAVANGTGEFVVTLSPAQTDGGTLTAIAIDRAGNNGPATNFPASDSGLPAVPAITAIEDDVGSVQGNIAAGGATDDTMPTLRGTTDIGSTVEVFIDGDSAGFATVDASGNWIFEIATPLSESTHYFTVQATNANGPGGLSAPVGITVDLSAPAQPVITSATDDVPGMTGTLDNGALTNDSRPTLNGTGEAGATIRILDNGVEIGSATVDQSGNWRFTPNAPLESNAHIFTAVATDPAGNSGQPSDGFTLNIDAQAPDVPVITSVIDDNNQPTVPVLPGQSTDDRQPILNGTGEPGATITIFDNGTPLGTAQVGENGSWTFPVPRNLSEGSHNLTVSATDPAGNTSAVSAPWTIVVDITPPAIPVLTSVVDDQPGITGNLVSGQLTNDATPTLNGRGEAGATINVYLDGNPASIGTTTVNSDGTWSFTPQTPLANGSHTFTLSATDPAGNSSSVSSGFVLTIDATPPAAPVIASVADNTAPVTGIVPNGGSTNETRPTLSGTGEAGTTISIYNGSALVGTAQVQANGSWSFTPSTSLGAGVWNLTATATDAAGNTSAASEIRSFTIDTTAPAAPVIDTVYDGTGPITGNLSSGQITDEARPVISGTREANTTIRLYDNGTLLAEIPADNSSSWRYTPDASLATGNHVITVIAVDAAGNASPVSDSVNFVVDTTPPLTPVITSVSDDQAPGLGTIANGQNTNDPTPTFSGTAEAGATITLYENGTVIGTTTAQPDGAWSVSTSTLASGTHVITAVATDAAGNSSPNSTAFTLTVDTTAPQTPILTSVVDDVAGGVTGNLANGQITNDNRPTLNGTAEAGSVVSIYDGDTLLGVTSANASGAWSFTPTTGLNDGTRTLTVTATDPAGNVSPATSGFTIVVDTLAPTVPLITSIVDDVPNNTGAIGNGQSTNDTQPTLNGTAEANSAVSIFDNSALVXTVNANASGNWSWTPTAALGQGSHAYSVSAADAAGNVSAASPSITIIVDTIAPGAPGNLVINATGNRVTGTAEAGSTVTITSDTGVVLGTATADGTGSFTATLTPAQTNGQPLLAFAQDKAGNTGIAAGFTAPDTRVPEAPIITNVVDDVGIYTGAIANGQVTNDAQPTLNGTAQAGATVSIYNNGALLGTTTANASGNWSFTPTGNLTEGSHAFTATATNANGTGSVSTAATVIVDTLAPGTPSGTLSADGGSLSGLAEANSTVTVTLTGGVTLTTTAGSNGAWSLTLPTKQIEGQLINVTATDAAGNASGTLGITAPVLPLAARDNITSLDLTSTAVTSTQSYSDYGLLLVGALGNVASVLGNDTAQVEFTIAEGGTGDVTIDAAATGIVLSLLSTQEIVVQRYDTSLGAWTTIVNTAVGDFANLLTLTGSGVTLNLSGLGEGQYRVLTYNTSLLATGSYTSLDVDVHQTSAGIISGPTISTGNVMADDTAPTGTTVTAITNANGVSTPVGAGGVDIQGQYGTLHINQDGSYTYTLAKPTAGYGHKESFTYTITQNGVGSSAAQLVINLGPAPVPGSVIATDNNASLVFDTHVSYVNNGPSTQSGVTVLSVGLGNVLNANLLDDMTNPIIFNVEEGATRTMTLQGTVGGVSLVSTFDLYVYRFNDAIQQYEQFRVEKGWINTLLLAGQSQPLTLTLPGGEYLFVLNTASGISVLTGYTLAISQDHTYAVDSITANTTGNVLTNDVVPTDALLTEVNGVAIAATGTTEVNGLYGSLIIDARGNYTYTLKNGVGADSIKTPDSFIYTVKAPNGDTDTASLNITPTARALDAINDVSDTLSVATLQDTAAWLDSSVGSASWGLLGKSGSGSGTFDVATGTVLKGASLVFDVSTLITLGNLNISWAIQENGTVIRNGTVPVANITLGSATVTVNLSGLELDAGTYTLNFTGTNTLAGAATITPRVIGTTVDLDNFETSGTHTVLGNIFDGSDAAGAMDQLNTVNTRLSISGYNGSAATLDAAANTTSATIQGHYGTLQINLDGAYTYTLNNGVAMSSITSKEVFTYQLDDKMGHTDSATLTIDMAPQIVSTNQNDVLIGSAYGDTLIYHLLNGADATGGNGVDRWQNFSTAQGDKIDIHELLTGWDHQAATLGNFVQVHTSGANTVISVDRDGAGSAFKSTDLVTLENVQLTLNDLLQNNHLITGG

SEQ ID NO: 6999 - DNA, 405 bp, Salmonella enterica
  misc_feature (244)..(244): n is a, c, g or t
gtggcgaatgacaccccgttctctgcgctatggcaacgcctgttaacccgtggatggcaaccggtagaggcttctacggtagacgactggatcaaacgggttggagatggcgtcatcctgttaagtagcgatccgcggcgtacgccggaagtcagcgataacccggtgatgattgccgaactcctgcgtgagttcccgcagtttgactggcaggtggcggtggccgaccttgaacaaagcgaanctatcggcgatcgctttaatgtacgtcggtttccggcgacgttggtttttacagacggcgagctacgcggcgcgctcagcggcattcatccctgggctgaactgctcacgctgatgcgttcgatggttgacactcccgcagcgcaggagacagtacaatga

SEQ ID NO: 7000 - protein, 134 aa, Salmonella enterica
  misc_feature (82)..(82): Xaa can be any naturally occurring amino acid
MANDTPFSALWQRLLTRGWQPVEASTVDDWIKRVGDGVILLSSDPRRTPEVSDNPVMIAELLREFPQFDWQVAVADLEQSEXIGDRFNVRRFPATLVFTDGELRGALSGIHPWAELLTLMRSMVDTPAAQETVQ

SEQ ID NO: 7001 - DNA, 2253 bp, Salmonella enterica
  misc_feature (1817)..(1817): n is a, c, g or t
atgtcgcataatgagaaatccccccatcagtcccccgtgcatgatacccgtgaatcacagcccggcctggactccctggcgccgtcagacggttcacatcgcccaacgccagaaccgacgccgccgggcgcgcaaccaacggcccccggcagcttaaaagcgcccgagaccgcgaatgataagctcaccgccctcgacgcctttcgtaaaggcagcgaaaattatgcgctgaccaccaatcagggcgtgcgcatcgccgacgatcaaaattctcttcgcgccggcagccgtggccctacgctgttggaagattttatcctgcgcgaaaaaattacccactttgaccatgagcgtatcccggagaggatcgttcacgcccgcggatcagcagcgcacggctattttcagtcatataaagacctgagcgacatcacgaaagccgcgtttctgtgcgatccacagaaaattaccccggtctttgttcgcttttcgacagtacagggcggcgcggggtctgctgataccgtacgtgatatccgcggttttgcgaccaaattttataccgaagagggaattttcgatctcgtcggtaataacacgccgatcttttttatccaggatgcgcataagtttccggattttgtgcacgccgttaagcccgaaccacattgggccattccgcaaggacagagcgcgcacgacaccttctgggactatgtttccttacagcctgagacgctgcacaacgtcatgtgggcaatgtcggatcgcggcattccacgcagttatcggacgatggaagggttcggcattcacaccttccgtctgatcaatgcgcaagggaaagcgacctttgtccgtttccactggaaaccgttggcgggtaaagcctcgctggtatgggatgagtcacaaaaactgaccggtcgcgatccggattttcaccgccgggatctgtgggaggccatcgaagcgggcgatttcccggaatacgagctgggcctacaactcattgccgaagaggatgaatttaaattcgattttgatctgctcgatccgaccaaactgattccggaagagttggtgccagtacaacgcgtcggcaaaatggtgttaaaccgtaatccggataactttttcgctgaaaacgaacaggcggcatttcatccagggcatattgttcccggcattgattttaccaacgatccgctgttacaggggcgtctgttctcttataccgacacgcaaatcagtcgtctgggcgggccaaacttccacgaaattccgattaaccgccctacctgcccctaccataacttccagcgtgacggtatgcaccggatggatatcgacaccaatccggcgaactatgaaccgaactccattaatgacaactggccgcgcgaaacgccgccagcgccaaaacgcggcggcttcgaatcataccaggaacgcgtggatggcaataaaatacgcgaacgcagcccctctttcggtgaatattactcgcatcctcgcctgttctggctcagtcagacgccgatagaacagcagcatattattgacgcgttcagctttgaactgggtaaagtcgcccgcgcgtatattcgggagcgggtggtcgatcagttagcgcatattgatgtcacgctggctcagggcgtcgcgcataatctcggttttgcactcacccatgagcaaacgcaaattgccccgcctcctgatgtcaacggtctgaaaaaagatccggcgctcagcctgtatgcggtgccggacggcgatgttaaaggccgagtggtcgctattctgctgaacgncaaggttaacgccgccgaactgttgaccattttgcaggctttaaaagccaaaggcgtccacgcaaaactgctctattcacggatgggtgaagtaacggctgatgacggttcaacattaactattgcggcaacctttgccggcgcgccgtcgctaacggtcgatgcggtaatagtaccgtgcggcaatattgccgatatcgagagttgcggcgatgctcgttactaccttctggaagcctacaaacatctgaagcccatcgcactggcaggcgacgcccgacggtttaaggcgcttttaaacattgatagccagggggaagaaggacttgttgaggcagataacgttgaccaccactttatggacactctgctgacgctgatggcggcacaccgtgtctggtcgcgtgcggggaaaattaacgcgattcctgcataa

SEQ ID NO: 7002 - protein, 750 aa, Salmonella enterica
  misc_feature (606)..(606): Xaa can be any naturally occurring amino acid
MSHNEKSPHQSPVHDTRESQPGLDSLAPSDGSHRPTPEPTPPGAQPTAPGSLKAPETANDKLTALDAFRKGSENYALTTNQGVRIADDQNSLRAGSRGPTLLEDFILREKITHFDHERIPERIVHARGSAAHGYFQSYKDLSDITKAAFLCDPQKITPVFVRFSTVQGGAGSADTVRDIRGFATKFYTEEGIFDLVGNNTPIFFIQDAHKFPDFVHAVKPEPHWAIPQGQSAHDTFWDYVSLQPETLHNVMWAMSDRGIPRSYRTMEGFGIHTFRLINAQGKATFVRFHWKPLAGKASLVWDESQKLTGRDPDFHRRDLWEAIEAGDFPEYELGLQLIAEEDEFKFDFDLLDPTKLIPEELVPVQRVGKMVLNRNPDNFFAENEQAAFHPGHIVPGIDFTNDPLLQGRLFSYTDTQISRLGGPNFHEIPINRPTCPYHNFQRDGMHRMDIDTNPANYEPNSINDNWPRETPPAPKRGGFESYQERVDGNKIRERSPSFGEYYSHPRLFWLSQTPIEQQHIIDAFSFELGKVARAYIRERVVDQLAHIDVTLAQGVAHNLGFALTHEQTQIAPPPDVNGLKKDPALSLYAVPDGDVKGRVVAILLNXKVNAAELLTILQALKAKGVHAKLLYSRMGEVTADDGSTLTIAATFAGAPSLTVDAVIVPCGNIADIESCGDARYYLLEAYKHLKPIALAGDARRFKALLNIDSQGEEGLVEADNVDHHFMDTLLTLMAAHRVWSRAGKINAIPA

SEQ ID NO: 7003 - DNA, 669 bp, Citrobacter koseri
  misc_feature (608)..(608): n is a, c, g or t
atgtcaaccccacgtcaaattcttgctgcaattttcgatatggatggactactgatcgattccgaaccgctctgggatcgcgctgaactggacgtgatggcaagtttaggcgtagatattactcggcgccatgaactgccagacacgcttgggctacgcattgatatggttgtcgatctctggtttgcgcagcaaccgtggaacggccccgatcgccaggaagtgacaaaccgtgttattgcccgcgcgattacgcttatcgaagagacgcgccctcttttaccgggtgtgcgcgaggccgtggcgctgtgtaaagcgcaggggctattagtggggcttgcctcggcatcgccgctgcatatgctggaaaaagtgctcaccatgtttgaactgcgcgacagttttgacgcgctggcctctgcggaaaaattgccctacagcaaaccgcatccgcaggtctatctggattgtgcggccaaattaggtgttgatccattaacctgcgtggcgctggaggattcggtgaatggtctaatcgcggcaaaggcggcgcgaatgcgcgccattgtggtgccagcagaagaaaaccagcctgatccgcgctttgngctggcgaatgtcaaacttaactcactgacagagctgacggcggcgcatctactcggttaa

SEQ ID NO: 7004 - protein, 222 aa, Citrobacter koseri
  misc_feature (203)..(203): Xaa can be any naturally occurring amino acid
MSTPRQILAAIFDMDGLLIDSEPLWDRAELDVMASLGVDITRRHELPDTLGLRIDMVVDLWFAQQPWNGPDRQEVTNRVIARAITLIEETRPLLPGVREAVALCKAQGLLVGLASASPLHMLEKVLTMFELRDSFDALASAEKLPYSKPHPQVYLDCAAKLGVDPLTCVALEDSVNGLIAAKAARMRAIVVPAEENQPDPRFXLANVKLNSLTELTAAHLLG

SEQ ID NO: 7005 - DNA, 2637 bp, Salmonella enterica
  misc_feature (259)..(259): n is a, c, g or t
atgagcgaccttgcgagagaaattacaccggtcaacattgaggaagagctgaaaagctcctatctggattatgcgatgtcggtcattgttggccgtgcgctgccggatgtccgagatggcctgaagccggtacaccgtcgcgtactttacgccatgaacgtattgggcaatgactggaacaaagcctataaaaaatctgcccgtgtcgttggtgacgtaatcggtaaataccatccccacggcgattccgcagtgtatnacaccatcgttcgtatggcgcagccattctcgctgcgttacatgctggtggatggtcagggtaacttcggttctattgacggcgactccgcggcggcaatgcgttatacggagatccgtctggcgaaaatcgcccacgaactgatggccgatctcgaaaaagagacggtggatttcgtggataactatgacggtacggaaaaaattccggacgtcatgccgaccaaaattccgaatctgctggtgaacggttcttccggtatcgcagtaggtatggcgacgaatatcccgccgcacaacctgacggaagtgattaacggctgcctggcgtatatcgacaacgaagacatcagcattgaagggctgatggaacatattccggggccggacttcccgaccgccgcgatcatcaacggtcgtcgtggtatcgaagaagcctaccgtaccggtcgtggcaaagtgtacattcgcgcccgcgcggaagttgaagctgacgcgaaaacgggccgtgaaaccatcatcgtccatgaaattccctatcaggtgaacaaagcgcgcctgatcgagaaaatcgccgagctggtgaaagataaacgcgtggaaggcatcagcgcgctgcgtgacgaatccgacaaagacgggatgcgcatcgtgattgaagtgaaacgcgatgcggtgggcgaggtggtgcttaataatctctactcccagacccagctacaggtttccttcggtattaacatggtggcgctgcatcacggccagccgaagatcatgaacctgaaagacatcatttcagcgttcgtgcgccaccgccgtgaagtggtgacgcgtcgtactatttttgaactgcgtaaagcccgtgaccgcgcgcatatccttgaagctctggcgattgcgctggctaacatcgacccgattatcgaactgattcgccgcgcgccaacgccggcagaagcaaaagcggcgctgatttcgcgtccgtgggatctgggcaacgttgctgcgatgctggagcgcgctggtgatgacgctgcgcgtccggaatggctggagccagaatttggcgtgcgtgacggtcagtattacctgactgagcagcaggcgcaggcgattctggatctgcgtttgcagaaactgaccggcctggagcatgaaaaactgctcgacgaatacaaagagttgctggagcagattgctgaactgctgcacattctgggcagcgccgatcgcctgatggaagtgatccgcgaagagatggagttaattcgcgatcagttcggcgatgagcgtcgtaccgaaatcaccgccaacagcgccgatattaatatcgaagatctgattagccaggaagatgttgtcgtgacgctgtctcaccagggttacgtcaaatatcaaccgctgacggattacgaagcgcaacgtcgtggtgggaaaggtaaatctgccgcgcgtattaaagaagaagactttatcgaccgcctgctggtggccaacacccatgacaccatcctctgcttctccagccggggccgtctgtactggatgaaggtctatcagttgccggaagccagccgcggcgcgcgcggtcgtccgatcgttaacctgctgccgctggaagccaacgaacgtatcaccgcgattctgccggttcgtgaatacgaagaaggcgtcaacgtctttatggcgaccgccagcggtaccgtgaagaaaacggcgctgaccgaattcagccgtccgcgttccgccggtattatcgcggtgaacctcaacgacggcgacgagctgattggcgttgacctgacttctggttctgacgaagtcatgctgttctcggccgcgggtaaagtggtgcgcttcaaagaagacgccgtccgtgcgatggggcgtaccgcgaccggtgtgcgcggtattaagctggcgggagacgataaagtcgtctctctgatcatcccacgcggcgaaggcgctattctgaccgtaacgcaaaacggctacgggaagcgtaccgcagcggacgagtacccgaccaagtctcgtgcgacgcagggcgttatctctatcaaagtgaccgagcgcaacggttccgttgtcggtgcggtacaggtagacgattgcgaccagatcatgatgatcacggatgccggtactctggtgcgtacccgagtgtccgagatcagcgtcgtgggacgtaatacccagggcgttatccttatccgcacggcggaagatgaaaacgtggtgggtctgcaacgcgttgctgaaccggtagatgacgaagaactcgacgctatcgacggcagcgtggcggaaggggatgaggatatcgccccggaagcggaaagcgatgacgacgttgcggatgacgctgacgagtaa

SEQ ID NO: 7006 - protein, 878 aa, Salmonella enterica
  misc_feature (87)..(87): Xaa can be any naturally occurring amino acid
MSDLAREITPVNIEEELKSSYLDYAMSVIVGRALPDVRDGLKPVHRRVLYAMNVLGNDWNKAYKKSARVVGDVIGKYHPHGDSAVYXTIVRMAQPFSLRYMLVDGQGNFGSIDGDSAAAMRYTEIRLAKIAHELMADLEKETVDFVDNYDGTEKIPDVMPTKIPNLLVNGSSGIAVGMATNIPPHNLTEVINGCLAYIDNEDISIEGLMEHIPGPDFPTAAIINGRRGIEEAYRTGRGKVYIRARAEVEADAKTGRETIIVHEIPYQVNKARLIEKIAELVKDKRVEGISALRDESDKDGMRIVIEVKRDAVGEVVLNNLYSQTQLQVSFGINMVALHHGQPKIMNLKDIISAFVRHRREVVTRRTIFELRKARDRAHILEALAIALANIDPIIELIRRAPTPAEAKAALISRPWDLGNVAAMLERAGDDAARPEWLEPEFGVRDGQYYLTEQQAQAILDLRLQKLTGLEHEKLLDEYKELLEQIAELLHILGSADRLMEVIREEMELIRDQFGDERRTEITANSADINIEDLISQEDVVVTLSHQGYVKYQPLTDYEAQRRGGKGKSAARIKEEDFIDRLLVANTHDTILCFSSRGRLYWMKVYQLPEASRGARGRPIVNLLPLEANERITAILPVREYEEGVNVFMATASGTVKKTALTEFSRPRSAGIIAVNLNDGDELIGVDLTSGSDEVMLFSAAGKVVRFKEDAVRAMGRTATGVRGIKLAGDDKVVSLIIPRGEGAILTVTQNGYGKRTAADEYPTKSRATQGVISIKVTERNGSVVGAVQVDDCDQIMMITDAGTLVRTRVSEISVVGRNTQGVILIRTAEDENVVGLQRVAEPVDDEELDAIDGSVAEGDEDIAPEAESDDDVADDADE

SEQ ID NO: 7007 - DNA, 2637 bp, Salmonella enterica
  misc_feature (248)..(248): n is a, c, g or t
atgagcgaccttgcgagagaaattacaccggtcaacattgaggaagagctgaaaagctcctatctggattatgcgatgtcggtcattgttggccgtgcgctgccggatgtccgagatggcctgaagccggtacaccgtcgcgtactttacgccatgaacgtattgggcaatgactggaacaaagcctataaaaaatctgcccgtgtcgttggtgacgtaatcggtaaataccatccccacggcgattncgcagtgtatgacaccatcgttcgtatggcgcagccattctcgctgcgttacatgctggtggatggtcagggtaacttcggttctattgacggcgactccgcggcggcaatgcgttatacggagatccgtctggcgaaaatcgcccacgaactgatggccgatctcgaaaaagagacggtggatttcgtggataactatgacggtacggaaaaaattccggacgtcatgccgaccaaaattccgaatctgctggtgaacggttcttccggtatcgcagtaggtatggcgacgaatatcccgccgcacaacctgacggaagtgattaacggctgcctggcgtatatcgacaacgaagacatcagcattgaagggctgatggaacatattccggggccggacttcccgaccgccgcgatcatcaacggtcgtcgtggtatcgaagaagcctaccgtaccggtcgtggcaaagtgtacattcgcgcccgcgcggaagttgaagctgacgcgaaaacgggccgtgaaaccatcatcgtccatgaaattccctatcaggtgaacaaagcgcgcctgatcgagaaaatcgccgagctggtgaaagataaacgcgtggaaggcatcagcgcgctgcgtgacgaatccgacaaagacgggatgcgcatcgtgattgaagtgaaacgcgatgcggtgggcgaggtggtgcttaataatctctactcccagacccagctacaggtttccttcggtattaacatggtggcgctgcatcacggccagccgaagatcatgaacctgaaagacatcatttcagcgttcgtgcgccaccgccgtgaagtggtgacgcgtcgtactatttttgaactgcgtaaagcccgtgaccgcgcgcatatccttgaagctctggcgattgcgctggctaacatcgacccgattatcgaactgattcgccgcgcgccaacgccggcagaagcaaaagcggcgctgatttcgcgtccgtgggatctgggcaacgttgctgcgatgctggagcgcgctggtgatgacgctgcgcgtccggaatggctggagccagaatttggcgtgcgtgacggtcagtattacctgactgagcagcaggcgcaggcgattctggatctgcgtttgcagaaactgaccggcctggagcatgaaaaactgctcgacgaatacaaagagttgctggagcagattgctgaactgctgcacattctgggcagcgccgatcgcctgatggaagtgatccgcgaagagatggagttaattcgcgatcagttcggcgatgagcgtcgtaccgaaatcaccgccaacagcgccgatattaatatcgaagatctgattagccaggaagatgttgtcgtgacgctgtctcaccagggttacgtcaaatatcaaccgctgacggattacgaagcgcaacgtcgtggtgggaaaggtaaatctgccgcgcgtattaaagaagaagactttatcgaccgcctgctggtggccaacacccatgacaccatcctctgcttctccagccggggccgtctgtactggatgaaggtctatcagttgccggaagccagccgcggcgcgcgcggtcgtccgatcgttaacctgctgccgctggaagccaacgaacgtatcaccgcgattctgccggttcgtgaatacgaagaaggcgtcaacgtctttatggcgaccgccagcggtaccgtgaagaaaacggcgctgaccgaattcagccgtccgcgttccgccggtattatcgcggtgaacctcaacgacggcgacgagctgattggcgttgacctgacttctggttctgacgaagtcatgctgttctcggccgcgggtaaagtggtgcgcttcaaagaagacgccgtccgtgcgatggggcgtaccgcgaccggtgtgcgcggtattaagctggcgggagacgataaagtcgtctctctgatcatcccacgcggcgaaggcgctattctgaccgtaacgcaaaacggctacgggaagcgtaccgcagcggacgagtacccgaccaagtctcgtgcgacgcagggcgttatctctatcaaagtgaccgagcgcaacggttccgttgtcggtgcggtacaggtagacgattgcgaccagatcatgatgatcacggatgccggtactctggtgcgtacccgagtgtccgagatcagcgtcgtgggacgtaatacccagggcgttatccttatccgcacggcggaagatgaaaacgtggtgggtctgcaacgcgttgctgaaccggtagatgacgaagaactcgacgctatcgacggcagcgtggcggaaggggatgaggatatcgccccggaagcggaaagcgatgacgacgttgcggatgacgctgacgagtaa

SEQ ID NO: 7008 - protein, 878 aa, Salmonella enterica
  misc_feature (83)..(83): Xaa can be any naturally occurring amino acid
MSDLAREITPVNIEEELKSSYLDYAMSVIVGRALPDVRDGLKPVHRRVLYAMNVLGNDWNKAYKKSARVVGDVIGKYHPHGDXAVYDTIVRMAQPFSLRYMLVDGQGNFGSIDGDSAAAMRYTEIRLAKIAHELMADLEKETVDFVDNYDGTEKIPDVMPTKIPNLLVNGSSGIAVGMATNIPPHNLTEVINGCLAYIDNEDISIEGLMEHIPGPDFPTAAIINGRRGIEEAYRTGRGKVYIRARAEVEADAKTGRETIIVHEIPYQVNKARLIEKIAELVKDKRVEGISALRDESDKDGMRIVIEVKRDAVGEVVLNNLYSQTQLQVSFGINMVALHHGQPKIMNLKDIISAFVRHRREVVTRRTIFELRKARDRAHILEALAIALANIDPIIELIRRAPTPAEAKAALISRPWDLGNVAAMLERAGDDAARPEWLEPEFGVRDGQYYLTEQQAQAILDLRLQKLTGLEHEKLLDEYKELLEQIAELLHILGSADRLMEVIREEMELIRDQFGDERRTEITANSADINIEDLISQEDVVVTLSHQGYVKYQPLTDYEAQRRGGKGKSAARIKEEDFIDRLLVANTHDTILCFSSRGRLYWMKVYQLPEASRGARGRPIVNLLPLEANERITAILPVREYEEGVNVFMATASGTVKKTALTEFSRPRSAGIIAVNLNDGDELIGVDLTSGSDEVMLFSAAGKVVRFKEDAVRAMGRTATGVRGIKLAGDDKVVSLIIPRGEGAILTVTQNGYGKRTAADEYPTKSRATQGVISIKVTERNGSVVGAVQVDDCDQIMMITDAGTLVRTRVSEISVVGRNTQGVILIRTAEDENVVGLQRVAEPVDDEELDAIDGSVAEGDEDIAPEAESDDDVADDADE

SEQ ID NO: 7009 - DNA, 657 bp, Salmonella enterica
  misc_feature (187)..(187): n is a, c, g or t
ttgatcaacgttcttcttgttgatgaccacgaactggtgcgcgcagggatacgacgcattcttgaagatataaagggcattaaagttgtcggtgaagcgtgctgcggagaggatgcggtaaaatggtgccgtactaacgccgttgacgtcgtgctgatggatatgaacatgcccggtattggcggcnttgaggcgacgcgtaaaattgcccgatcgacagcggatatcaaagtgatcatgctgaccgtccatacggagaacccgttgcccgccaaagtgatgcaggctggcgcagctggctatctcagcaaaggcgctgcgcctcaggaggtggtgagcgctattcgttcggtgtattccggacaacgttatatcgcctccgatatcgctcagcagatggcgctcagtcagattgagcctgcaaaaacggaaacgccgttcgccagtttgtctgaacgcgagttgcagattatgctgatgatcaccaagggtcagaaggtcaatgagatttcagaacagctgaatctcagtcctaaaacggtgaacagctatcgctatcgtatgttcagtaaattaaacattcatggtgatgttgagctgactcacctggcaatccgccatggcctgtgtaatgcggagacgttaacaagccagtga

SEQ ID NO: 7010 - protein, 218 aa, Salmonella enterica
  misc_feature (63)..(63): Xaa can be any naturally occurring amino acid
MINVLLVDDHELVRAGIRRILEDIKGIKVVGEACCGEDAVKWCRTNAVDVVLMDMNMPGIGGXEATRKIARSTADIKVIMLTVHTENPLPAKVMQAGAAGYLSKGAAPQEVVSAIRSVYSGQRYIASDIAQQMALSQIEPAKTETPFASLSERELQIMLMITKGQKVNEISEQLNLSPKTVNSYRYRMFSKLNIHGDVELTHLAIRHGLCNAETLTSQ

SEQ ID NO: 7011 - DNA, 1575 bp, Salmonella enterica
  misc_feature (98)..(98): n is a, c, g or t
ttgaaagtaagaaagctatttctgatgttgtttattgccgttccactgatcgtaatgatattggtggggttactcgcgggtatcttccagctaaaacnagatatcgccgtcagcgccaatacgctgctgcggtttagcgcggatatatctgccgcctcctggcaagtcgccggaaaagccgccagactggctgagagttcctgcactgatacgctgaaagaactgtccagaacgcgggccttcactccttatgtacgtgacattgggtttctggaaaatggtgatatcacttgctcctttgtcacaggaaccgaacgctatcatttttcccggctggcagggctttccttacctgcttcttatccggaacggtggttgcgatctatcggtagtatggccgaaggacccgatcgccttgttgtggtttatgtgaaaaaagtagcagcgaataaagcggccttcgtcattgtggattcgcagtatgtccaggagctcatagagatattggcagcagagagagcatcagcctttagcctgacattcggcgcaggggaggcgattaccagcgctgcgacgttgcgcggtaaggcgtttttaacgcagcggttcacctcaaccgatcacactctccagctgatggtgcgaacccccttctcaacgttatcggcatactggttacaaaacctttttatttttgttccgctgtcattgtgtctttctgtagggatgatgttgttctacaggcgctggtatttaaaacgtttatctctggcccgggagattgccaggggaataacgcacaatgagtttacggtacattatcagcctgtttttaatgttaaacacggtagttgcggcggcgtggaggcgctaatgcgctggccgcaaccggatggccgttttataaccccggatatttttattaccgccgcagaaaatgaaggcatgattattccactctctcgtcatctgttcgaactgattgctcatgacgtaataaactggactgtaccggatgatttctatatcagcgtaaatatatcgcctgcgcatcttatggatgacggttttatacaagatatagaggcgctcaggactcgtttgggaacgataacgcttatgttggagctcaccgaacgtagcctgattgtagaaccttcacaggtcgcagaaaaactttcaacgctccgtgaaaaaggcgtgttaatagcgattgatgattttgggaccggctattgctcactctcctatctccagcaattacctgtagactctcttaaaatagacagaacgtttatcgataccattgataccagcagcgatgatgttcctgtcctggatactatcattacgctgagtcagcgactggggctcaatgtggttgccgaaggggtcagtacccagcaccaattgcgttacatcttaagccacggggtaggattcgttcagggatttctttatgccaggccgatgggggctaatgactttatgagctggcttggcaagtcggcccagaggcaaaatggtttgctcaagggggaaaacgaatctgcgagtggcctggtggctgaataa

SEQ ID NO: 7012 - protein, 524 aa, Salmonella enterica
  misc_feature (33)..(33): Xaa can be any naturally occurring amino acid
MKVRKLFLMLFIAVPLIVMILVGLLAGIFQLKXDIAVSANTLLRFSADISAASWQVAGKAARLAESSCTDTLKELSRTRAFTPYVRDIGFLENGDITCSFVTGTERYHFSRLAGLSLPASYPERWLRSIGSMAEGPDRLVVVYVKKVAANKAAFVIVDSQYVQELIEILAAERASAFSLTFGAGEAITSAATLRGKAFLTQRFTSTDHTLQLMVRTPFSTLSAYWLQNLFIFVPLSLCLSVGMMLFYRRWYLKRLSLAREIARGITHNEFTVHYQPVFNVKHGSCGGVEALMRWPQPDGRFITPDIFITAAENEGMIIPLSRHLFELIAHDVINWTVPDDFYISVNISPAHLMDDGFIQDIEALRTRLGTITLMLELTERSLIVEPSQVAEKLSTLREKGVLIAIDDFGTGYCSLSYLQQLPVDSLKIDRTFIDTIDTSSDDVPVLDTIITLSQRLGLNVVAEGVSTQHQLRYILSHGVGFVQGFLYARPMGANDFMSWLGKSAQRQNGLLKGENESASGLVAE

SEQ ID NO: 7013 - DNA, 1575 bp, Salmonella enterica
  misc_feature (611)..(611): n is a, c, g or t
ttgaaagtaagaaagctatttctgatgttgtttattgccgttccactgatcgtaatgatattggtggggttactcgcgggtatcttccagctaaaacgagatatcgccgtcagcgccaatacgctgctgcggtttagcgcggatatatctgccgcctcctggcaagtcgccggaaaagccgccagactggctgagagttcctgcactgatacgctgaaagaactgtccagaacgcgggccttcactccttatgtacgtgacattgggtttctggaaaatggtgatatcacttgctcctttgtcacaggaaccgaacgctatcatttttcccggctggcagggctttccttacctgcttcttatccggaacggtggttgcgatctatcggtagtatggccgaaggacccgatcgccttgttgtggtttatgtgaaaaaagtagcagcgaataaagcggccttcgtcattgtggattcgcagtatgtccaggagctcatagagatattggcagcagagagagcatcagcctttagcctgacattcggcgcaggggaggcgattaccagcgctgcgacgttgcgcggtaaggcgtttttaacgcagcggttcanctcaaccgatcacactctccagctgatggtgcgaacccccttctcaacgttatcggcatactggttacaaaacctttttatttttgttccgctgtcattgtgtctttctgtagggatgatgttgttctacaggcgctggtatttaaaacgtttatctctggcccgggagattgccaggggaataacgcacaatgagtttacggtacattatcagcctgtttttaatgttaaacacggtagttgcggcggcgtggaggcgctaatgcgctggccgcaaccggatggccgttttataaccccggatatttttattaccgccgcagaaaatgaaggcatgattattccactctctcgtcatctgttcgaactgattgctcatgacgtaataaactggactgtaccggatgatttctatatcagcgtaaatatatcgcctgcgcatcttatggatgacggttttatacaagatatagaggcgctcaggactcgtttgggaacgataacgcttatgttggagctcaccgaacgtagcctgattgtagaaccttcacaggtcgcagaaaaactttcaacgctccgtgaaaaaggcgtgttaatagcgattgatgattttgggaccggctattgctcactctcctatctccagcaattacctgtagactctcttaaaatagacagaacgtttatcgataccattgataccagcagcgatgatgttcctgtcctggatactatcattacgctgagtcagcgactggggctcaatgtggttgccgaaggggtcagtacccagcaccaattgcgttacatcttaagccacggggtaggattcgttcagggatttctttatgccaggccgatgggggctaatgactttatgagctggcttggcaagtcggcccagaggcaaaatggtttgctcaagggggaaaacgaatctgcgagtggcctggtggctgaataa

SEQ ID NO: 7014 - protein, 524 aa, Salmonella enterica
  misc_feature (204)..(204): Xaa can be any naturally occurring amino acid
MKVRKLFLMLFIAVPLIVMILVGLLAGIFQLKRDIAVSANTLLRFSADISAASWQVAGKAARLAESSCTDTLKELSRTRAFTPYVRDIGFLENGDITCSFVTGTERYHFSRLAGLSLPASYPERWLRSIGSMAEGPDRLVVVYVKKVAANKAAFVIVDSQYVQELIEILAAERASAFSLTFGAGEAITSAATLRGKAFLTQRFXSTDHTLQLMVRTPFSTLSAYWLQNLFIFVPLSLCLSVGMMLFYRRWYLKRLSLAREIARGITHNEFTVHYQPVFNVKHGSCGGVEALMRWPQPDGRFITPDIFITAAENEGMIIPLSRHLFELIAHDVINWTVPDDFYISVNISPAHLMDDGFIQDIEALRTRLGTITLMLELTERSLIVEPSQVAEKLSTLREKGVLIAIDDFGTGYCSLSYLQQLPVDSLKIDRTFIDTIDTSSDDVPVLDTIITLSQRLGLNVVAEGVSTQHQLRYILSHGVGFVQGFLYARPMGANDFMSWLGKSAQRQNGLLKGENESASGLVAE

SEQ ID NO: 7015 - DNA, 540 bp, Salmonella enterica
  misc_feature (10)..(10): n is a, c, g or t
atgacaagangttacctaagaattctcctggtgggaagtctcttgagcctgaccgcctgcgcgccgcagagcgaagttcgccagatgcatcaaagcattagcaccctgaataaagagatgacccaactgaatcaggaaacggtaaaaattacccaacaaaataagctgaatgcggagtcaacccgcggcgtctatttgttgcctggcgccaatacgcctgcccggctggagagccagatcggtacgctacgtatgacattgctggaaattacgcctgtcgcagacggcgctcacgcaacgttacacattcagggcgagtcccgcgatccgctgccggcattcagcgctaccgtagagtacgggcaacttcagggcactacggagaactatcaggaggtgaatgcacagagccttctggtaaatgcccctgccagcttgctggcgcccagtgatgtcaatatttcgttaccgttgaaggggatcacaccggcgcagttaggcttcattcgcatccatgatattcagcctgttaatcaataa

SEQ ID NO: 7016 - protein, 179 aa, Salmonella enterica
  misc_feature (4)..(4): Xaa can be any naturally occurring amino acid
MTRXYLRILLVGSLLSLTACAPQSEVRQMHQSISTLNKEMTQLNQETVKITQQNKLNAESTRGVYLLPGANTPARLESQIGTLRMTLLEITPVADGAHATLHIQGESRDPLPAFSATVEYGQLQGTTENYQEVNAQSLLVNAPASLLAPSDVNISLPLKGITPAQLGFIRIHDIQPVNQ

SEQ ID NO: 7017 - DNA, 1323 bp, Salmonella enterica
  misc_feature (611)..(611): n is a, c, g or t
atggaaaacatacaaaagctcatcgcccggtatcctttggtcgaggatctggtcgccctcaaagaaaccacctggtttaacccgggcgccacctctcttgcacaaggtctaccgtatgtcggcctgacggagcaggacgtaaacgccgcccatgaccgtctggcgcgctttgcgccgtatctggcgaaagcgtttccgcaaaccgctgccgctggcggcatgatcgaatctgacgtggtcgctattccggccatgcaaaagcggctggaaaaagagtatgggcaaacgatcgacggtgaaatgctgttaaaaaaagacagtcacctggcaatctctggttccattaaagcgcgcggcggcatctacgaggtgctaacgcacgcggaaaaactggcgctggaggcgggtctgttaaccaccgacgatgactatagcgtgttgctttcgccggaatttaaacaattcttcagccagtacagtatcgccgtcggttcaaccggcaatctggggctatcgatcggtatcatgagcgcctgcatcggttttaaagtgacggtacatatgtctgccgacgcccgcgcctggaaaaaagcgaagctgcgtagccacgncgtgacggtcgtggaatacgaagatgattacggcgtggcggttgagcagggccgtaaagcagcgcaatccgatccaaactgtttctttatcgatgatgaaaactctcgcacgctatttctgggctatgcggtagcgggtcagcgtctgaaagcgcaattcgctcaacagggacgcgtcgttgacgccagtcacccactgtttgtttatctgccgtgcggcgttggcggcggccctggcggcgtcgcctttggcctgaaactggcgtttggcgacaacgtccactgtttctttgccgaaccgacccattcaccctgcatgttactcggcgtttataccggtctgcacgatgccatctcagtacaagatatcggtattgataacctgacggcggctgacggcctggcggtaggtcgcgcttcgggctttgttgggcgggcaatggagcgtctgcttgacggcctttataccttagacgatcaaacaatgtatgacatgctgggctggctggcgcaggaggaaggaattcgactggagccatcagctctggcggggatggccggaccacagcgcatttgcgccgccgccgcgtatcagcaaaggcatggattcagtcagacgcagctcggcaacgcgacgcatctggtatgggcaaccgggggcggcatggtgccggaagatgaaatggaacaatacctggcaaaaggacgctaa

SEQ ID NO: 7018 - protein, 440 aa, Salmonella enterica
  misc_feature (204)..(204): Xaa can be any naturally occurring amino acid
MENIQKLIARYPLVEDLVALKETTWFNPGATSLAQGLPYVGLTEQDVNAAHDRLARFAPYLAKAFPQTAAAGGMIESDVVAIPAMQKRLEKEYGQTIDGEMLLKKDSHLAISGSIKARGGIYEVLTHAEKLALEAGLLTTDDDYSVLLSPEFKQFFSQYSIAVGSTGNLGLSIGIMSACIGFKVTVHMSADARAWKKAKLRSHXVTVVEYEDDYGVAVEQGRKAAQSDPNCFFIDDENSRTLFLGYAVAGQRLKAQFAQQGRVVDASHPLFVYLPCGVGGGPGGVAFGLKLAFGDNVHCFFAEPTHSPCMLLGVYTGLHDAISVQDIGIDNLTAADGLAVGRASGFVGRAMERLLDGLYTLDDQTMYDMLGWLAQEEGIRLEPSALAGMAGPQRICAAAAYQQRHGFSQTQLGNATHLVWATGGGMVPEDEMEQYLAKGR

SEQ ID NO: 7019 - DNA, 759 bp, Salmonella enterica
  misc_feature (95)..(95): n is a, c, g or t
atggataagttacagaatattcggggcgtcgcctttgatcttgacggtacgctggtggatagcgcgccgggtcttgccgcggcggtggatatggngctgtatgcgctggaactgccggtcgcgggcgaggagcgcgtgattacctggattggtaacggcgcagacgtattgatggaacgcgcgctggcctgggctcgcgaggagcgcgccacgctgcgtaagacgatggggaaaccgcccgttgatgaagatattcctgccgaggaacaggtacgcattctgcgtaaactgttcgacaggtattatggcgaagtggcggaagagggcacttttttatttccgcatgtcgccgacacgctgggcgcgctgcacgccagcggattgtcattaggtctggtgacgaataagccgacgccgttcgtcgcgccgttgctggaatcgcttgatatcgccaaatactttagtgtggttatcggcggcgatgatgtgcaaaataagaagccgcatccggagccgctgttgctggtggcaagccggctgggcatgatgccggagcagatgctttttgtcggcgattcgcgtaatgatattcaggctgcaaaagcggcgggctgcccttcggttggcctgacatacggctacaattatggcgaagcgatcgctcttagcgagccggacgtcatttatgacagttttaacgatcttttgcccgcacttgggcttccgcatagcgataaccaggaaataaaaaatgactaa

SEQ ID NO: 7020 - protein, 252 aa, Salmonella enterica
  misc_feature (32)..(32): Xaa can be any naturally occurring amino acid
MDKLQNIRGVAFDLDGTLVDSAPGLAAAVDMXLYALELPVAGEERVITWIGNGADVLMERALAWAREERATLRKTMGKPPVDEDIPAEEQVRILRKLFDRYYGEVAEEGTFLFPHVADTLGALHASGLSLGLVTNKPTPFVAPLLESLDIAKYFSVVIGGDDVQNKKPHPEPLLLVASRLGMMPEQMLFVGDSRNDIQAAKAAGCPSVGLTYGYNYGEAIALSEPDVIYDSFNDLLPALGLPHSDNQEIKND

SEQ ID NO: 7021 - DNA, 1080 bp, Salmonella enterica
  misc_feature (637)..(637): n is a, c, g or t
atgactgtactgattcacgtcctgggatcggatatccctcaccataaccacaccgtgctgcggtttttcaatgatacgctggccgccacaagcgagcacgcgcgcgaatttatggttgccggtgaagataacggcttcacggaaagctgcccggcgctctcgcttcgtttttatggcagtaagaaagcgctggcgcaggcggtcatcgccaaagcgaaagcaaatcgtcgacagagattcttctttcacggtcagttcaacaccagcctgtggctggcgctgttaagcggcggtattaagccagctcagttttactggcatatctggggcgcggatctctacgaagtgtccaacgggctgaaattccgccttttctacccgcttcgtcgtatcgcgcaggggcgagtagggtgcgtattcgcgacgcgcggcgatctcagctattttgcgcgccagcatccgaacgtacgcggcgagttgctctatttcccgacgcgcatggatccttccctgaatgctatggcaaaagagtgccaacgtgcggggaaattgaccattttagtagggaactccggcgatcgcagtaaccaacatattgcggcgttacgggcggtgtatcagcagtttggcgatacgntaaacgtggtggtgccgatgggctatccggccaataaccaggcctatattgatgaggttcgccaggccggcctggcgctatttagcgccgaaaatctacaaattcttagcgaaaaaatggaatttgatgcctatcttgcgcttttgcgccagtgcgacctcggttattttatttttgcccgccaacaggggatcgggacgttgtgtctgctaattcaggccgatatcccgtgcgtactgaaccgcgacaatcctttctggcaggatatggcggaacagcatctgcccgtcctgtttaccacggacgatcttaatgagcaggtcgtgcgcgaggcgcagcgtcagctcgcatcggtagataaaagcggcatcaccttctttagccccaactacctgcagccgtggcataatgcgttgagaatcgccgcaggagaagccgaatga

SEQ ID NO: 7022 - protein, 359 aa, Salmonella enterica
  misc_feature (213)..(213): Xaa can be any naturally occurring amino acid
MTVLIHVLGSDIPHHNHTVLRFFNDTLAATSEHAREFMVAGEDNGFTESCPALSLRFYGSKKALAQAVIAKAKANRRQRFFFHGQFNTSLWLALLSGGIKPAQFYWHIWGADLYEVSNGLKFRLFYPLRRIAQGRVGCVFATRGDLSYFARQHPNVRGELLYFPTRMDPSLNAMAKECQRAGKLTILVGNSGDRSNQHIAALRAVYQQFGDTXNVVVPMGYPANNQAYIDEVRQAGLALFSAENLQILSEKMEFDAYLALLRQCDLGYFIFARQQGIGTLCLLIQADIPCVLNRDNPFWQDMAEQHLPVLFTTDDLNEQVVREAQRQLASVDKSGITFFSPNYLQPWHNALRIAAGEAE

SEQ ID NO: 7023 - DNA, 1221 bp, Salmonella enterica
  misc_feature (734)..(734): n is a, c, g or t
atggaaaagcattttgtcggttctgaaatcggtcaattacgcagcgtaatgttgcatcggcccaatctcagcctaaaaagacttaccccttcaaattgtcaggaattactttttgacgatgtattatccgtagagcgcgctggcgaagagcatgacatttttgccaacacgctgcgccagcaagggatagaagtgttgctgttaaccgacctgctcacccaaacgctggatgtggctgacgctaaagcctggctactggatacgcaaatttccgattatcgccttgggcccacctttgccgcagatattcgcgcctggctggcggatatgccgcaccgtgaactggctcgccatttaagcggcggtttaacttacggcgaaattcccgcctccataaaaaatatggtggtcgatactcacgatattaatgactttattatgaagccattaccgaatcacctatttacccgtgacacgtcctgctggatatataacggcgtctcaattaaccccatggcgaaacctgcacgccaacgtgaaacgaataatttacgtgctatttatcgctggcatcctcaattcgcaggcggtgatttcattaaatatttcggcgacgaggacattaattacgaccacgccactttagagggcggcgatgtgctggtgattggccgcggcgcggtgttgatcggtatgtctgaacgtactacgccgcagggcgtcgagttcctggngcaggcattgtttaaacatcgtcaggcggaacgcgtcattgccgttgaactgccaaaacatcgctcctgcatgcaccttgacaccgtcatgacccacattgatatcgacaccttctccgtctatccggaagtcgttcgcccggacgttcagtgctggacgctgacgccagacggacgcggcggtctgaaacgaacccaggagagcacgctggttcatgctcttgaaaaagcgcttggcatcgatcaggtgcgcttaatcaccactggcggcgacgcatttgaagctgagcgcgaacagtggaatgacgccaataacgtgctcaccctgcgtcccggcgtggtggtgggctatgagcgcaacatctggaccaacgaaaaatacgacaaagccggcattaccgtccttcccattcccggcgatgaactgggtcgcgggcgcgggggcgcacgctgcatgagctgtccactggaacgcgatggtatttaa

SEQ ID NO: 7024 - protein, 406 aa, Salmonella enterica
  misc_feature (245)..(245): Xaa can be any naturally occurring amino acid
MEKHFVGSEIGQLRSVMLHRPNLSLKRLTPSNCQELLFDDVLSVERAGEEHDIFANTLRQQGIEVLLLTDLLTQTLDVADAKAWLLDTQISDYRLGPTFAADIRAWLADMPHRELARHLSGGLTYGEIPASIKNMVVDTHDINDFIMKPLPNHLFTRDTSCWIYNGVSINPMAKPARQRETNNLRAIYRWHPQFAGGDFIKYFGDEDINYDHATLEGGDVLVIGRGAVLIGMSERTTPQGVEFLXQALFKHRQAERVIAVELPKHRSCMHLDTVMTHIDIDTFSVYPEVVRPDVQCWTLTPDGRGGLKRTQESTLVHALEKALGIDQVRLITTGGDAFEAEREQWNDANNVLTLRPGVVVGYERNIWTNEKYDKAGITVLPIPGDELGRGRGGARCMSCPLERDGI

SEQ ID NO: 7025 - DNA, 705 bp, Salmonella enterica
  misc_feature (131)..(131): n is a, c, g or t
atgattgtaagaaaacgccgtggtcgccggacgttgtgttgtctggcgggccttatggcctgctcgttttttatcaataccacgtatgcctggcaacaagaatatatcgctgaagcggctccggggcatangacggaacgctatacctgggacagcgatcaccaaccgaattacaacgacatactggccgaacgtattcagtctacgcaaaatacagtggggccggtgcttagcctggcggatgaaaccccgcttgatgcgaccagcggtatcagtatgggctggaattttccgctttcccgacgcgtgaccactgggccggtcgcggcgctgcattacgacggttcgacgtcatcaatgtataacgaatatggcgatagcgcgacgacattagcgtttaccgatccgttatggcacgccagcgtcagtacgttaggctggcgggtaaactcgcagttcggcgatgtccgtccctgggcgcaaatcagctataaccaacagtttggggagaatatctggaaagcgcagtccgggttgagtcgtatgaccgcaggaaatcaggcgggaaactggctggatgtcaccgtaggcgcggacgtgttacttaacccgcacctggcggcgtatgcggcgttttcccaggcggaaaatagcgctacggatagcgattatttgtataccctgggggtgagcgccaggttttaa

SEQ ID NO: 7026 - protein, 234 aa, Salmonella enterica
  misc_feature (44)..(44): Xaa can be any naturally occurring amino acid
MIVRKRRGRRTLCCLAGLMACSFFINTTYAWQQEYIAEAAPGHXTERYTWDSDHQPNYNDILAERIQSTQNTVGPVLSLADETPLDATSGISMGWNFPLSRRVTTGPVAALHYDGSTSSMYNEYGDSATTLAFTDPLWHASVSTLGWRVNSQFGDVRPWAQISYNQQFGENIWKAQSGLSRMTAGNQAGNWLDVTVGADVLLNPHLAAYAAFSQAENSATDSDYLYTLGVSARF

SEQ ID NO: 7027 - DNA, 531 bp, Salmonella enterica
  misc_feature (131)..(131): n is a, c, g or t
atggccagcagaggcgtaaacaaggtgattctcgttggtaatctgggccaggacccggaagtacgctatatgccgagtggcggcgctgtcgccaacttaacgctggctacttctgaatcctggcgcgatangcagaccggcgaaatgaaagagcagactgaatggcaccgggtggtgatgttcggcaaactggcggaagtggccggcgaatatctgcgtaaaggttctcaggtgtatatcgaaggtcaattgcgtacccgcaagtggaccgatcagagtggccaggaacgctatacgactgaaattaacgttccgcagatcggcggcgtgatgcagatgctgggtggtcgccagggcggcggcgcgccggcaggcggtcagcagcaggggggttggggtcagccacaacaacctcagcagccgcagggcggcaaccagttcagcggcggcgcgcagtcgcgtccacagcaatccgcgccagcgccgtctaacgaaccgccaatggattttgacgacgacattccgttctga

SEQ ID NO: 7028 - protein, 176 aa, Salmonella enterica
  misc_feature (44)..(44): Xaa can be any naturally occurring amino acid
MASRGVNKVILVGNLGQDPEVRYMPSGGAVANLTLATSESWRDXQTGEMKEQTEWHRVVMFGKLAEVAGEYLRKGSQVYIEGQLRTRKWTDQSGQERYTTEINVPQIGGVMQMLGGRQGGGAPAGGQQQGGWGQPQQPQQPQGGNQFSGGAQSRPQQSAPAPSNEPPMDFDDDIPF

SEQ ID NO: 7029 - DNA, 3684 bp, Salmonella enterica
  misc_feature (3055)..(3055): n is a, c, g or t
gtgagcagcaaagttgaacaactgcgtgcgcagttaaatgaacgtattctggtgctggacggcggtatgggcaccatgatccagagctatcgtctacatgaagaagatttccgcggggagcgctttgccgactggccctgcgacctgaaaggcaacaatgacctgctggtactcagcaagccggaggtgatcgccgctatccacaacgcctactttgaggctggcgcggatatcatcgaaaccaacacctttaactcgacaaccattgcgatggcggattaccggatggaatccctgtcggcggaaatcaactatgcggcggccaaactggcgcgcgcctgcgccgatgaatggacggcgcgaacaccagaaaaaccacgttttgttgcgggcgtgcttggtccaactaaccgcacggcctccatttcgccggacgtcaacgacccggcgtttcgtaatatcaccttcgatcagctggtggcggcctaccgtgaatccaccaaagcgctggtggaaggcggggcggacctgatcctgattgaaaccgtctttgacaccctgaatgcgaaagcggcggtgtttgcggtgaaagaagagtttgaagcgctgggcgttgatctgccgatcatgatttccggcaccatcaccgacgcctctggtcgtaccctctccggccagacgaccgaagccttttataactcgctgcgccacgccgaggcgctcacttttggccttaactgcgcgctggggcctgatgagctgcgccagtacgtccaggaactgtcgcggattgccgaatgctacgtcaccgcgcacccgaacgccggcctgccgaacgctttcggcgagtacgacctcgacgccgacaccatggcgaaacagattcgcgaatgggcggaagcgggcttcctgaatatcgttggcggctgctgtggcactacgccggagcatatcgccgccatgagccgcgccgttgccggtttgctgccgcgccagctgccggatatcccggtcgcctgccgcctttccggcctggagccgctgaacattggtgacgatagcctgtttgtgaacgtcggcgaacgtactaacgtcaccggctcggccaaatttaaacggctgatcaaagaagagaaatacagcgaagcgctggatgtcgcccgtcagcaggtagaaagcggcgcgcagattattgatatcaatatggatgaggggatgctcgacgccgaagcggcgatggtgcgtttcctcagcctgattgccggtgagccggacattgcccgtgtaccaatcatgatcgactcctccaaatgggaggttatcgaaaaagggctgaagtgcattcagggtaaaggcatcgtcaactctatttcgatgaaagagggcgtggaagcctttattcatcatgcgaagttgctacgtcgctatggcgccgcagtggtggtgatggcctttgatgagcaggggcaggccgatacccgcgcgcgtaaaatcgaaatttgccgccgagcctacaaaattctcaccgaagaggtgggtttcccgccggaagacatcatcttcgacccgaatatcttcgccgtggcgaccggtattgaagagcacaacaactacgcgcaggactttatcggcgcttgcgaagacatcaaacgcgagctgccgcacgcgctgatctccggcggcgtgtctaacgtgtccttctcgttccgcggcaacgacccggtacgtgaggctatccacgcggtattcctctactacgccatccgcaatggcatggacatgggcatcgtcaacgccgggcaactggcgatttatgacgacctgcctgccgaactgcgcgatgcagttgaagatgtcattcttaaccgtcgcgatgacggcaccgagcgtttgctggatttggcggagaaataccgcggcagcaaaaccgacgaagctgccaacgcccagcaggcggaatggcgtagctgggacgtgaaaaagcgtctcgaatactcgctggtgaaaggcatcaccgaatttatcgaacaggataccgaagaagcccgtcagcaggccgcccgcccgattgaggtgattgaagggccgttgatggacggcatgaacgtggtcggcgacctgttcggcgaagggaaaatgttcctgccgcaggtggtgaaatccgctcgcgtgatgaaacaagcggtggcctacctggagccgtttattgaagccagcaaagaaaaaggctccagcaacggcaagatggtgatcgccaccgtgaagggcgatgtgcacgatattggtaaaaatatcgttggcgtggtgctgcaatgtaacaactacgaaatcgtcgatcttggcgtgatggtgccagcggagaaaatcctcagaacggcgcgtgaagtgaatgccgatctgatcggtctttccgggcttatcaccccgtcgctggacgaaatggtcaacgtggcgaaagagatggagcgtcagggctttactatcccgctactgatcggcggcgcaaccacttcgaaagcgcatacggcggtgaaaatcgagcagaactacagcggtccgacggtctacgtgcagaatgcttcgcgtaccgtgggcgtggtggcggcgctactctccgacaaccagcgcgatgactttgtcgcccgtacccgcaaagagtacgaaaccgtgcgtattcagcacgcccgcaaaaaaccgcgtacgccgccggtcacgctggaagcggcgcgcgataatgatctggcattcgattgggaacgctacaccccgccggtagcccaccgtctgggcgtgcagggggtggaagccagcatcgaaactctgcgcaactacatcgactggacgccgttctttatgacctggtcgctggccggcaaatacccgcgcattctggaagatgaggtggtgggcgttgaggcgcagcgtctgtttaaagacgccaatgatatgctggataaactcagcgccgagaagctgttgaatccgcgtggcgtggtgggcctgttcccggctaaccgtgtgggtgacgacatcgaaatctatcgcgacgcaaccngtactcatgttctgacggtcagccaccacctgcgccagcagaccgagaaagtcggttttgccaactactgtctggcggattttgtcgcgccgaaactgagcggcaaagcggattacatcggtgctttcgcggtgaccggcggtctggaggaggatgcgctggcggacgccttcgaagcgcaacacgacgactataacaagatcatggtgaaagcgattgccgaccgtctggcggaagcgtttgccgagtatctgcatgagcgtgtacgtaaggtttactggggatatgcgccgaacgagagcctgagtaacgacgaattaatccgcgaaaactaccaggggattcgcccggcgccgggttatcctgcctgcccggaacataccgaaaaaggcactatctggcagctactggatgtcgaaaaacacaccgggatgaagctcaccgaatctttcgccatgtggcctggcgcgtcggtctccggctggtacttcagccatcctgagagcaaatacttcgcggtagcgcagatccaacgcgatcaggtgacagattatgctttccgtaaaggaatgagcgttgaggacgttgagcggtggctggcgccgaacctggggtacgatgcggactga

SEQ ID NO: 7030 - protein, 1227 aa, Salmonella enterica
  misc_feature (1019)..(1019): Xaa can be any naturally occurring amino acid
MSSKVEQLRAQLNERILVLDGGMGTMIQSYRLHEEDFRGERFADWPCDLKGNNDLLVLSKPEVIAAIHNAYFEAGADIIETNTFNSTTIAMADYRMESLSAEINYAAAKLARACADEWTARTPEKPRFVAGVLGPTNRTASISPDVNDPAFRNITFDQLVAAYRESTKALVEGGADLILIETVFDTLNAKAAVFAVKEEFEALGVDLPIMISGTITDASGRTLSGQTTEAFYNSLRHAEALTFGLNCALGPDELRQYVQELSRIAECYVTAHPNAGLPNAFGEYDLDADTMAKQIREWAEAGFLNIVGGCCGTTPEHIAAMSRAVAGLLPRQLPDIPVACRLSGLEPLNIGDDSLFVNVGERTNVTGSAKFKRLIKEEKYSEALDVARQQVESGAQIIDINMDEGMLDAEAAMVRFLSLIAGEPDIARVPIMIDSSKWEVIEKGLKCIQGKGIVNSISMKEGVEAFIHHAKLLRRYGAAVVVMAFDEQGQADTRARKIEICRRAYKILTEEVGFPPEDIIFDPNIFAVATGIEEHNNYAQDFIGACEDIKRELPHALISGGVSNVSFSFRGNDPVREAIHAVFLYYAIRNGMDMGIVNAGQLAIYDDLPAELRDAVEDVILNRRDDGTERLLDLAEKYRGSKTDEAANAQQAEWRSWDVKKRLEYSLVKGITEFIEQDTEEARQQAARPIEVIEGPLMDGMNVVGDLFGEGKMFLPQVVKSARVMKQAVAYLEPFIEASKEKGSSNGKMVIATVKGDVHDIGKNIVGVVLQCNNYEIVDLGVMVPAEKILRTAREVNADLIGLSGLITPSLDEMVNVAKEMERQGFTIPLLIGGATTSKAHTAVKIEQNYSGPTVYVQNASRTVGVVAALLSDNQRDDFVARTRKEYETVRIQHARKKPRTPPVTLEAARDNDLAFDWERYTPPVAHRLGVQGVEASIETLRNYIDWTPFFMTWSLAGKYPRILEDEVVGVEAQRLFKDANDMLDKLSAEKLLNPRGVVGLFPANRVGDDIEIYRDATXTHVLTVSHHLRQQTEKVGFANYCLADFVAPKLSGKADYIGAFAVTGGLEEDALADAFEAQHDDYNKIMVKAIADRLAEAFAEYLHERVRKVYWGYAPNESLSNDELIRENYQGIRPAPGYPACPEHTEKGTIWQLLDVEKHTGMKLTESFAMWPGASVSGWYFSHPESKYFAVAQIQRDQVTDYAFRKGMSVEDVERWLAPNLGYDAD

SEQ ID NO: 7031 - DNA, 831 bp, Serratia marcescens
  misc_feature (679)..(679): n is a, c, g or t
atggcaggaaaacaggcaaggacactcaccctcggcgcgtcgattggcgtcgcgctgctgacgttggccggttgcgcgcagccgccgcacaccgacgcgcaggcccagcagcggctggcgcatcagtcggtgctggcggtgaactggttccaacagtccggcgaataccgcgcgctggcgcatcaggcgttcaacagcgcgcagcgcgccttcgatcaggccagggccgcgccgggccgtaaaaaggcggtggtggtcgatctggatgaaaccatgctggacaacagcgcctactccggctggcaggcgcagcagggccagccatacgacggcgccacctgggccaaatggacgcaggccgaacaggccggcgcggtgccgggcgcggtgtcgttcgcccgctacgtcaacgcccatcagggcacgatgttctacgtgtcgaaccgcaagcagagcgaatacgccgccacggtggccaacatgcagaagctcggtttcaccggcatgtcggaaaagaccgtgctgctcagcaccgatacctccaataagcaggcgcgcttcgacgccatcaaacaagccggctacgacatcgtggtgtacgcgggcgacaacctgaacgacttcggcgccgcgacttaccaccaggacaacgcgcagcgccgggcattcgtcagcgagnaccagaacaagttcggcaccgaattcatcgtgctgcccaacccgctgtacggcgattgggaaagcgggctggcccgcgactacaacaagctgacgccgcagcagaagctgcaggtgcgccaacaggcgatcaaagcctggcgcgggcgctga

SEQ ID NO: 7032 - protein, 276 aa, Serratia marcescens
  misc_feature (227)..(227): Xaa can be any naturally occurring amino acid
MAGKQARTLTLGASIGVALLTLAGCAQPPHTDAQAQQRLAHQSVLAVNWFQQSGEYRALAHQAFNSAQRAFDQARAAPGRKKAVVVDLDETMLDNSAYSGWQAQQGQPYDGATWAKWTQAEQAGAVPGAVSFARYVNAHQGTMFYVSNRKQSEYAATVANMQKLGFTGMSEKTVLLSTDTSNKQARFDAIKQAGYDIVVYAGDNLNDFGAATYHQDNAQRRAFVSEXQNKFGTEFIVLPNPLYGDWESGLARDYNKLTPQQKLQVRQQAIKAWRGR

SEQ ID NO: 7033 - DNA, 1590 bp, Enterobacter cloacae
  misc_feature (1315)..(1315): n is a, c, g or t
atgagcgatcacgtcacgccggacaaaccggtgatctggaccgtctccatcacccgcctgttcgatctgttccgagacatcagcctcgagttcgaccatctggcgaccatcatcccgatccgcctcggctttgaggaggcggtgcagcacatccgcgcccgcctggctaccgagccttgcgacgccatcatcgccgccggctccaacggcgcctacctgaaaagccgcctgtcggtgccggtcatcctggtcaagcccggcggcttcgacctgctgcaggcgctgagcaaggcgcgcagaaccgccgatcggatcggcgtcatcacctataaaacccctctgcccgcgctgctggagttccagcagaccttcgatctgccgctggagcagcgcagctacgtcaccgaagaggacgcgcgcggccagatcgccgagctgaaagccgccggcattcaggccgtggttggagcgggcctcatcagcgagttggcggaagaggccgggctcaccgccatttttctctattccgccgccaccctgcgcgccgccttcagcgatgcgctggacgtgacgcgcctgatgctgggcggcggcaaacgcggcggcgattacgccgcgcgcaataccctgcagccgcgctacgggctgagcgatttgcaaggcgactccccgcagatggagcagacgcggcgcaccatcatgctgtacgcccgctcgccggcggcggtattaattgagggagaaaccggcaccggcaaggagctggcggcgcaggcgatccaccgggaatacttttcccggcgcggcgcgccggccagaggcgcgacgccgccgttcgtcgccatcaactgcggcgccatagccgaatcgctgctggaggcggagctgttcggctatgaggaaggcgcctttaccggctcacggcgcggcggccggcgcgggctgttggaaaccgccaacggcggcaccctgtttctggatgagatcggcgaaatgccgctgcacctgcaaacccggctgctgcgcgcgctggaagagaaggccgtcacccgggtcggcgggcagcagccggtggcggtcgactttcgcgtcatcagcgccacccacaaccacctggagcaggcgattcaacggggcggctttcgcgccgatctgttctaccgcctgagcgccctgcggctgcagctgccgccattgcgggcgcgcggcgacgatatcgcgatgctggcggaacactttctgaagcggtcgctggcggcgctcgacgtgccgctgacggagccgctgcgcgccgccctggccggctgttacgccncgctgagtcattacgcctggcccggcaacctgcgcgaactgcgcaacatgatggagcgggtggcgctgatgctgagcaccggcaccgcgccgagcggcgagacgctgcgctggctgctgccggagctggcggcggccacgccgcccgagacgccgccagcgcccgtctccgcccacgaagcgctggcgcgatgcggaggcgaccacgccgccgccgcccgattgctcgggatcagccgcaccaccttatggcgccggctgaaaaaaacgaactga

SEQ ID NO: 7034 - protein, 529 aa, Enterobacter cloacae
  misc_feature (439)..(439): Xaa can be any naturally occurring amino acid
MSDHVTPDKPVIWTVSITRLFDLFRDISLEFDHLATIIPIRLGFEEAVQHIRARLATEPCDAIIAAGSNGAYLKSRLSVPVILVKPGGFDLLQALSKARRTADRIGVITYKTPLPALLEFQQTFDLPLEQRSYVTEEDARGQIAELKAAGIQAVVGAGLISELAEEAGLTAIFLYSAATLRAAFSDALDVTRLMLGGGKRGGDYAARNTLQPRYGLSDLQGDSPQMEQTRRTIMLYARSPAAVLIEGETGTGKELAAQAIHREYFSRRGAPARGATPPFVAINCGAIAESLLEAELFGYEEGAFTGSRRGGRRGLLETANGGTLFLDEIGEMPLHLQTRLLRALEEKAVTRVGGQQPVAVDFRVISATHNHLEQAIQRGGFRADLFYRLSALRLQLPPLRARGDDIAMLAEHFLKRSLAALDVPLTEPLRAALAGCYAXLSHYAWPGNLRELRNMMERVALMLSTGTAPSGETLRWLLPELAAATPPETPPAPVSAHEALARCGGDHAAAARLLGISRTTLWRRLKKTN

SEQ ID NO: 7035 - DNA, 1536 bp, Serratia marcescens
  misc_feature (520)..(520): n is a, c, g or t
atgaagcacacattcaaacgcaatgcgctgttggccgccgtactgctggcggcgggaaccggcccggtctgggcggcgaaggacgcggtgatcgccgtggcctccaacttcaccaccctcgatccttacgacgccaacgatacgctgtcgcaggcggtggccaagtctttctatcaggggctgttcggcttcgacaaggacatgaagctggtgaacgtgctggcggacagctatgaggtcagcaaagacggcctgacctacaccgtcaaactgcaccaggggattaaattccacgacggtaccgcgttcaacgccgaggcggtgaaggtaaacctcgatcgcgccagcaacccggacagccacctcaagcgctacaacctgttcaagatgatcgacaaaaccgaagcggtggacgccaatacggtgaagatcgtgctgaaagcgccgttctcggcgttcgtcaacaacctggcgcacccggcggcggcgatcatctcgccggcggcgctgaagcaatacngcaaggagatcggtttccacccggtcggcaccgggccgtatcagttcatcacctggaaccagaccgatttcgtcaaggtgaagaagttcgacggctactggcagccggggctgccgaagctcgacagcatcacctggcgcccggtggtggataacaacacccgcgcggcgatgctgcaaaccggcgaggcgaccttcgccttcccgatcccttacgagcaggccaaggtgctggagggcaatgccaagctggacgtggtggccgcgccgtcgatcctgcagcgttacatcagcatgaacgtcactcagaagccgttcgacaacccgaaggtacgccaggcgctgaactatgccatcaacaaggacgcgctgatcaaagtggcgttcgccgggtacgcggtgccggcggaagggccggtgccgccggccattgacttcgctgcccgctataagccgtggccgtacgatccggccaaggcgcgcgagctgctgaaagaggccggctacccgaacggcttcaccaccacgctgtggtcttcccacaaccacagcaccgcgcagaaggtgctgcagttcacccagcagcagctggcgcaggtgggggtaaaagtgacggtgacggcgatggatgccgggcagcgtgcggcgcaggtggagagcgtcggggggaaggacaccggcgtgcgtctgttctacaccggctggtcggcctcgaccggggaagcggactgggcgctgtcgccgctgttctccacccaggcggcgccgccgaagcagttcaacaccgcgttctacagcaacccgcaggtggataaggatctgaccgacgcgctggcgaccaccgatcgcgccgagaagcagaagctgtatcaggacgcgcaggatcgcatttgggccgatgcgccctggatcttcctggcgaccgaacgtctgttgtcggccaacagcaaacagctgagcggtttctacgtgatgccggatacctcgttcaactttgataacgccgatctgaaataa

SEQ ID NO: 7036 - protein, 511 aa, Serratia marcescens
  misc_feature (174)..(174): Xaa can be any naturally occurring amino acid
MKHTFKRNALLAAVLLAAGTGPVWAAKDAVIAVASNFTTLDPYDANDTLSQAVAKSFYQGLFGFDKDMKLVNVLADSYEVSKDGLTYTVKLHQGIKFHDGTAFNAEAVKVNLDRASNPDSHLKRYNLFKMIDKTEAVDANTVKIVLKAPFSAFVNNLAHPAAAIISPAALKQYXKEIGFHPVGTGPYQFITWNQTDFVKVKKFDGYWQPGLPKLDSITWRPVVDNNTRAAMLQTGEATFAFPIPYEQAKVLEGNAKLDVVAAPSILQRYISMNVTQKPFDNPKVRQALNYAINKDALIKVAFAGYAVPAEGPVPPAIDFAARYKPWPYDPAKARELLKEAGYPNGFTTTLWSSHNHSTAQKVLQFTQQQLAQVGVKVTVTAMDAGQRAAQVESVGGKDTGVRLFYTGWSASTGEADWALSPLFSTQAAPPKQFNTAFYSNPQVDKDLTDALATTDRAEKQKLYQDAQDRIWADAPWIFLATERLLSANSKQLSGFYVMPDTSFNFDNADLK

SEQ ID NO: 7037 - DNA, 1833 bp, Serratia marcescens
  misc_feature (1472)..(1472): n is a, c, g or t
atgagaagattactgacgacattggcgattttactggtggtcgtggtggcggggatgtccgcgctggtactgctggtcaatccgaatgattttcgcggttacatggtcaaaaaggtcgagcagaagagcggctaccagctgacgctcgaaggcgatctgcgttggcatatctggccgcagctcagcattttggccgggcgcatgacgctgaccgcgccgggcgccaaggcgccggtggtgagcgcggaaaacatgcgtcttgacgtcaaactgttgccgctgctgtcgcatcagctgtttgtgaaacaggtgatgttgaaaaacgccgtcattcgcctcacgcccgacagtgaagagctctcgcaagtggacgccccgattgcgccggccggcagcggcgctgatgcggcagacgcggcctggaaattcgatatcgataacctgcgcgtcgtggacagcctgttgatttggcagcgcgccgacaacgagcaaatcaatgtccgggacatcaatcttaccctgcagcaaacggagaaacggcaggcgcggctggacatctccagtcgggtcaaccgcgatcagcgcgacctggccttcagcatggcggccgatatcgatcttcagcagttcccgcaccagatcggtgccaaggtgacccagttcaattaccaattgtcgggggcggatattccgaacggcggtattcaaggcgagggcaatgctcaggtggtctatcagcagacgccggcgcaaattgccgtcagccagctgaacgtcagtgccaataacagtcagttgaccggcgatatcagcgccagcctgggggcggtgcccggctatgtggtgaacctgaattcggctaatctcgatctcgacgcgctttccggttggcaatccagcaccaataccgccgagcagcctgccgtgaccgccgcgccggtgatcgccagccaggttgacgatcggcagcagaacctggaagcgctgcgcgatttcaatgcacagctgaatctgcaggcggcgcagttgacctaccgcggtatgaacgttacccagttagccgtcgcggcggataatcaacgcggcctgctgacgctgcataaacttgccgggcgattggccggcggcgatttctccttgccgggatcgctcgatgctcgcggcaataaaccggtgataaacgtgcagccgaccctgaaccaggttgagctcggcacggtgctcaaagccttcgacatgccgcagatgctgaccggcaaattcagcatgaaaggagatttgaccggcgatcgcctttcttcacagtcatttgagcaccgttggcgcggtacggcgcagttggcaatgcaggatgcgcagttgcacggcctgaacattcagcaattgatccaacaggcggtggcgcgcaacgataacagcgtgcgcgggcaagacagctatcagcgctataccgaagtcaaaagcgtctcggngcgggccagcctgagccagggcactgtcaagctcagcagcctgacggcggattcgcctttgctggcgctgaccggcgccggcagtatcgatatgccgggaaaacagtgcgatatggcgcttaacgtgcgcgtcacaggcggctggcaagggcgcggcgaactgatcgagcaactgcaaaaaacgccgatcccgctgcgggtttacgggccgtggcaacggctgaattaccaactgcaggtcgatcaggtgctgcgcaaaacgctgcaggatcgggctaaagatgcgctgaacaaatgggctgaaaagaacaaggattcgcgcgaaggccaggatctgaaaaagctgctcgacaaactgtaa

SEQ ID NO: 7038 - protein, 610 aa, Serratia marcescens
  misc_feature (491)..(491): Xaa can be any naturally occurring amino acid
MRRLLTTLAILLVVVVAGMSALVLLVNPNDFRGYMVKKVEQKSGYQLTLEGDLRWHIWPQLSILAGRMTLTAPGAKAPVVSAENMRLDVKLLPLLSHQLFVKQVMLKNAVIRLTPDSEELSQVDAPIAPAGSGADAADAAWKFDIDNLRVVDSLLIWQRADNEQINVRDINLTLQQTEKRQARLDISSRVNRDQRDLAFSMAADIDLQQFPHQIGAKVTQFNYQLSGADIPNGGIQGEGNAQVVYQQTPAQIAVSQLNVSANNSQLTGDISASLGAVPGYVVNLNSANLDLDALSGWQSSTNTAEQPAVTAAPVIASQVDDRQQNLEALRDFNAQLNLQAAQLTYRGMNVTQLAVAADNQRGLLTLHKLAGRLAGGDFSLPGSLDARGNKPVINVQPTLNQVELGTVLKAFDMPQMLTGKFSMKGDLTGDRLSSQSFEHRWRGTAQLAMQDAQLHGLNIQQLIQQAVARNDNSVRGQDSYQRYTEVKSVSXRASLSQGTVKLSSLTADSPLLALTGAGSIDMPGKQCDMALNVRVTGGWQGRGELIEQLQKTPIPLRVYGPWQRLNYQLQVDQVLRKTLQDRAKDALNKWAEKNKDSREGQDLKKLLDKL

SEQ ID NO: 7039 - DNA, 1722 bp, Serratia odorifera
  misc_feature (973)..(973): n is a, c, g or t
atgaagcaaaccgtagccacactgatcgccaaaacgctggatcaagccggtgtaaaacgcatttggggcgtgaccggcgattcgctcaacggccttagcgacagcctgcaccgcatgggcaccatcgaatggctgggcacccgccatgaagaggtggccgccttcgccgccggcgccgaagcccagctcaccggccagctggcggtgtgcgccggttcctgcggccccggcaacctgcacctgatcaacggcctgttcgactgccaccgcaaccatgtgccggtgctggcgatcgccgcgcacattccttccagcgaaatcggcagcggctacttccaggaaacgcatccgcaggagctgttccgcgaatgcagccactattgcgagctggtttccaacccggaacagctgccgcgcgtgctggagatcgccatgcgcaaggcaatcctcaaccgcggcgtctcggtggtggtcctgccgggcgatgtggcgctgcgcatggcgccggaagacgcgtccctgacctggcataccccggcgctgccgctggtgcagccgccgatgagcgagcttaacaagctggcggaaacgctgaacaaggcgaagaacatcaccctgatgtgcggcagcggctgcgccggcgcgcacgatgaggtggtcaagctggccgagctgctgcaggcgccggtggtgcacgcgctgcgcggcaaagagcatatcgaatgggataacccttacagcgtcggcatgaccgggttgatcggcttctcctccggctaccacgcgatgatgaacgccgacacgctggtgctgctcggcacccagttcccctaccgcgcgttctaccccaccaacgccaacatcattcagatcgacatcaaccccggcagcatcggcgcacactgcccggtcaatatggcgctggtaggcgatatccacaccaccctcaccgccctgctgccgcagctggagnccaagcgcgaccgggcgttcctcgacaaggcgctggagcattaccgcaacgcgcgcaaggatctcgacgggctggcgaccgccaacgacgaccagccgatccacccgcagtatctggcgcagcagctcagtcggtacgccagcgacgacgccatcttcacctgcgacgtcggcacgccgacggtgtgggccgcccgctacgtgaaaatgaacggcaagcgccgcctgctcggttcgttcaaccacggttcgatggccaacgccatgccgcaggcgataggcgcccaggccaccgcgccggataaacaggtgatcgccatgtgcggcgacggcggcttcaccatgctgatgggggatttcctgtcgctggcgcagctcaagctgccggtgaaaatcgtggtgttcaacaacagcgtgctggggttcgtggcgatggagatgaaggccggcggctacctgaccgacggcaccgatctgcataacccggacttcgcggcgatcgccaacgccgccggcatcaagggcatccgcgtggaaaaagcctcggatctggacggcgcgctgcaggagatgttggcgcaccccggcccggcgctgctggacgtggtcaccgccaagcaagagctggcgatgccgccgcagatcaagttcgaacaggcgaaaggtttcagcctgtacatgctgcgcgccatcatcaacggccgcggcgacgaagtggtcgagctggcgaaaaccaactggctgcgctaa

SEQ ID NO: 7040 - protein, 573 aa, Serratia odorifera
  misc_feature (325)..(325): Xaa can be any naturally occurring amino acid
MKQTVATLIAKTLDQAGVKRIWGVTGDSLNGLSDSLHRMGTIEWLGTRHEEVAAFAAGAEAQLTGQLAVCAGSCGPGNLHLINGLFDCHRNHVPVLAIAAHIPSSEIGSGYFQETHPQELFRECSHYCELVSNPEQLPRVLEIAMRKAILNRGVSVVVLPGDVALRMAPEDASLTWHTPALPLVQPPMSELNKLAETLNKAKNITLMCGSGCAGAHDEVVKLAELLQAPVVHALRGKEHIEWDNPYSVGMTGLIGFSSGYHAMMNADTLVLLGTQFPYRAFYPTNANIIQIDINPGSIGAHCPVNMALVGDIHTTLTALLPQLEXKRDRAFLDKALEHYRNARKDLDGLATANDDQPIHPQYLAQQLSRYASDDAIFTCDVGTPTVWAARYVKMNGKRRLLGSFNHGSMANAMPQAIGAQATAPDKQVIAMCGDGGFTMLMGDFLSLAQLKLPVKIVVFNNSVLGFVAMEMKAGGYLTDGTDLHNPDFAAIANAAGIKGIRVEKASDLDGALQEMLAHPGPALLDVVTAKQELAMPPQIKFEQAKGFSLYMLRAIINGRGDEVVELAKTNWLR

SEQ ID NO: 7041 - DNA, 2283 bp, Enterobacter cloacae
  misc_feature (1235)..(1235): n is a, c, g or t
atgaccgaacttaacgagaaattagccaacgcttgggaaggtttcagcaagggtgactggcagaatgaagtcaacgttcgtgacttcatccagaaaaactacacgccttatgaaggtgacgagtccttcctggctggggcaactcaggccaccaccaccttgtgggacaaggttatggaagggatcaaactggaaaaccgcactcacgcgccggttgatttcgacaccaacgttgcttcaaccatcgtttctcacgacgcgggttacatcgccaaagagctggaaaccatcgtgggtctgcagaccgacgcccctctgaaacgcgcgctgatcccgttcggcggcatcaaaatggtcgaaggttcgtgcaaagtgtacggccgcgagctggatccgcagctgaaaaaagtgttcaccgaataccgtaaaacccacaaccagggcgtattcgacgtttacaccaaagacatcctgaactgccgtaaatccggcgtgctgaccggcctgccggacgcctacggccgcggccgcatcatcggcgactaccgccgcgtggcgctgtacggtatcgacttcctgatggccgacaagctgaaccagttcaaatcgctgcaggaaaaactggaaaacggtgaagatctggaaatgaccatccagctgcgcgaagagatcgctgaacagcaccgcgctctggctcagatcaaagagatggccgccaaatacggctacgacatctccggcccggccaccagcgcgcaagaagcggtgcagtggacctacttcggctacctggccgcggtgaaatcccagaacggcgcagccatgtccttcggccgcgtgtccaccttcctcgacgtgttcatcgagcgcgacatcaaggcgggcaaactgaccgaagaacaagcgcaggaactgatcgaccacctggtgatgaaactgcgtatggtgcgcttcctgcgtacccctgagtacgatgagctgttctccggcgacccaatctgggcaacggaatccctggccggtatgggcgttgacggccgcaccctggtcaccaaaaacagcttccgcttcctgaacaccctgtacaccatggggccgtctccggagccgaacatgaccatcctgtggtctgagaagctgccgctgaacttcaagaaattcgcggcgaaagtgtccatcgacacctcttccgttcagtacgaaaacgacgacctgatgcgccctgacttcaacancgatgactacgccatcgcttgctgcgtcagcccgatgatcgtcggcaaacaaatgcagttcttcggtgcccgcgccaacctggcgaaaaccatgctgtacgccatcaacggcggcgttgacgaaaaactgaaaatgcaggtcggccctaaagaagcgccgatgatggacgaagtgctggactatgacaaagtcatggcgcgcatggaccactttatggattggctggccaagcagtacgtgaccgcgctgaacatcattcactacatgcacgacaagtacagctacgaagctgcgctgatggcactgcatgaccgtgacgtttatcgcaccatggcttgcggcatcgccggcctgtccgtggcggccgactccctgtctgccatcaagtacgcgaaagtcaccaccattcgcgacgaagacggcctggccatcgacttcaaagtggaaggcgagtatccgcagttcggtaacaacgacgcccgcgtcgatgacatcgcctgcgacctggtggaacgtttcatgaagaaaattcagaaactgcgcacctaccgcaatgcggtaccgacccagtccgtactgaccatcacctccaacgtggtgtacggtaagaaaaccggtaacaccccggatggccgccgcgcaggcgcaccgttcggcccaggtgccaacccgatgcacggccgcgaccagaaaggcgcagtagcctccctgacctcggtagccaaactgccgtttgcctacgcgaaagacgggatctcctacaccttctccatcgtgcctaacgcgctgggtaaagacgacgacgtgcgtaaagccaacctggcgggcctgatggatggttacttccaccatgaagcctccatcgaaggcggccagcacctgaacgtcaacgtgatgaaccgcgaaatgctgctggacgcgatggaaaaccctgagaaataccctcagctgaccatccgcgtttccggttacgccgtgcgcttcaactcgctgaccaaagagcagcagcaggacgtgattactcgtaccttcactcaaacgatgtaa

SEQ ID NO: 7042 - protein, 760 aa, Enterobacter cloacae
  misc_feature (412)..(412): Xaa can be any naturally occurring amino acid
MTELNEKLANAWEGFSKGDWQNEVNVRDFIQKNYTPYEGDESFLAGATQATTTLWDKVMEGIKLENRTHAPVDFDTNVASTIVSHDAGYIAKELETIVGLQTDAPLKRALIPFGGIKMVEGSCKVYGRELDPQLKKVFTEYRKTHNQGVFDVYTKDILNCRKSGVLTGLPDAYGRGRIIGDYRRVALYGIDFLMADKLNQFKSLQEKLENGEDLEMTIQLREEIAEQHRALAQIKEMAAKYGYDISGPATSAQEAVQWTYFGYLAAVKSQNGAAMSFGRVSTFLDVFIERDIKAGKLTEEQAQELIDHLVMKLRMVRFLRTPEYDELFSGDPIWATESLAGMGVDGRTLVTKNSFRFLNTLYTMGPSPEPNMTILWSEKLPLNFKKFAAKVSIDTSSVQYENDDLMRPDFNXDDYAIACCVSPMIVGKQMQFFGARANLAKTMLYAINGGVDEKLKMQVGPKEAPMMDEVLDYDKVMARMDHFMDWLAKQYVTALNIIHYMHDKYSYEAALMALHDRDVYRTMACGIAGLSVAADSLSAIKYAKVTTIRDEDGLAIDFKVEGEYPQFGNNDARVDDIACDLVERFMKKIQKLRTYRNAVPTQSVLTITSNVVYGKKTGNTPDGRRAGAPFGPGANPMHGRDQKGAVASLTSVAKLPFAYAKDGISYTFSIVPNALGKDDDVRKANLAGLMDGYFHHEASIEGGQHLNVNVMNREMLLDAMENPEKYPQLTIRVSGYAVRFNSLTKEQQQDVITRTFTQTM

SEQ ID NO: 7043 - DNA, 1032 bp, Serratia marcescens
  misc_feature (1019)..(1019): n is a, c, g or t
gtgggcccagtaatgctagatgtcgccggctatgagctggatgcagaagaacgcgagattttgaaacacccgctggttggcggattgatcctgtttacccgcaacttccacgatgcggagcagctgcgtgagctggtgcgccagatccgcgccgcctcgcacgatcggctggtggtggcggtagaccaggagggcgggcgcgtgcagcgcttccgcgagggcttcacccgcctgccggcggcgcagtcgttcgccgcgttgcacaatgcgcaggaaggcggccggctggcgcaggaggccggctggctgatggcggcggaaatgatcgcgcaggatatcgacatcagcttcgcgccggtgctggacatcggccacggcagcgcggcgatcggcgaacgttcgttccacagcgatccgcagcaggcgctggcgatggccgaacgctttatcctcggcatgcacagcgccggcatgaaaaccaccggcaaacacttccctgggcacggcgccgtcagcgccgattcgcacaaggaaaccccgcgcgatccgcggccgctggcgcagatccgcgagcatgacatggcgatcttccgcgagctgatcaaccgccaactgttggacgccgtcatgccggcccacgtcatctatactgaagcggacccgcgcccggccagcggctcgccttactggctgcagcagatcctgcgtcaggagctgggcttcgacggcgtgattttctccgacgatctgtcgatggaaggcgccgccatcatgggcagctacgccgagcgcggccaggcggcgctggatgccgggtgcgacatgatcctggtgtgcaaccaccgcgaaggcgcggtcagcgtgctggataacctgtccccggtcaaagcagagaaggtgaagcggttatatcatcgcggtcagttcacccgtcaggaactgcgcgactccgagcgctggcagcaggcgcacaaggcgctcagcgcgctgagtgaacgctgggaggagcacaagcagcnttcgcaggggtga

SEQ ID NO: 7044 - protein, 343 aa, Serratia marcescens
  misc_feature (340)..(340): Xaa can be any naturally occurring amino acid
MGPVMLDVAGYELDAEEREILKHPLVGGLILFTRNFHDAEQLRELVRQIRAASHDRLVVAVDQEGGRVQRFREGFTRLPAAQSFAALHNAQEGGRLAQEAGWLMAAEMIAQDIDISFAPVLDIGHGSAAIGERSFHSDPQQALAMAERFILGMHSAGMKTTGKHFPGHGAVSADSHKETPRDPRPLAQIREHDMAIFRELINRQLLDAVMPAHVIYTEADPRPASGSPYWLQQILRQELGFDGVIFSDDLSMEGAAIMGSYAERGQAALDAGCDMILVCNHREGAVSVLDNLSPVKAEKVKRLYHRGQFTRQELRDSERWQQAHKALSALSERWEEHKQXSQG

SEQ ID NO: 7045 - DNA, 861 bp, Serratia fonticola
  misc_feature (41)..(41): n is a, c, g or t
atgaagaaatcgcgtaaagtcttccagaatgtggtgatcgncggcgtcgtcgcctggctgttgctgttcgtgttcatgccgaacctgatgatcatcgccaccagcttcctgacccgcgacgacgccaatctggtgcagatggtgttcacgctggacaactaccggcgcttgttcgatccgttgtatgcccaggtgctgctgcactcgctgaacatggcgctgatcgccaccctgtgctgcctggcgatcggctacccgttcgcctttatcctggcgcggttgccgcagaaggtgcggccgctgctgctgtttctgctgatcgtgcccttctggaccaattcgctgatccgcatctacggcctgaagctgtttctcagcacccgcggctatctcaacgacgcgctgctgtggatcggcgtcatcgacaagccgctgcgcatcatgtacacctcggaagcggtgatcctcggcctggtgtatatcctgctgccgtttatggtgatgccgctctactccagcatcgaaaagctcgataagtcctgcctggaggcggcgcgcgatctcggcgccggcaagctgcagacctttatccgcatcatcgtgccgctgaccatgccgggcatcatcgccggctgcctgctggtggtgctgccggcgatggggctgttcttcgtcgccgatctgatgggcggcgccaagaatctgctgatcggcaacgtgattaaaagccagttcctcaatatccgcgactggccgttcggcgcggccaccagcatctgcctgacgctggtgatggggctgttgctgctggtctattaccgggccgcccgcctgctgaacaagaaggaggatctggcatga

SEQ ID NO: 7046 - protein, 286 aa, Serratia fonticola
  misc_feature (14)..(14): Xaa can be any naturally occurring amino acid
MKKSRKVFQNVVIXGVVAWLLLFVFMPNLMIIATSFLTRDDANLVQMVFTLDNYRRLFDPLYAQVLLHSLNMALIATLCCLAIGYPFAFILARLPQKVRPLLLFLLIVPFWTNSLIRIYGLKLFLSTRGYLNDALLWIGVIDKPLRIMYTSEAVILGLVYILLPFMVMPLYSSIEKLDKSCLEAARDLGAGKLQTFIRIIVPLTMPGIIAGCLLVVLPAMGLFFVADLMGGAKNLLIGNVIKSQFLNIRDWPFGAATSICLTLVMGLLLLVYYRAARLLNKKEDLA

SEQ ID NO: 7047 - DNA, 1371 bp, Serratia liquefaciens
  misc_feature (17)..(17): n is a, c, g or t
atgacgattaaagccancgacggcggcccggcgggcaaaccgcagctgcgcaaatccctcaagctgtggcaggtggtgatgatgggcctggcctatctgacgccgatgacggtgttcgataccttcggcatcgtctccggcctcaccgacggccatgtgccgacctcctatctgttggcgctggccggcgtgctgttcaccgccatcagctacggcaaactggtacgccagtttcctaccgccggctccgcctacacctatgcgcagaaggcgatcaacccgcacgtcggttttctggtggggtggtcatcgctgctcgattatctgttcctgccgatgatcaacacgctgctggcgaagatttacttgaccgcgctgttcccggaagtgccgccctgggtgtgggtggtgggcttcgttatcctgattaccgccatcaacctgaaaagcgtcaatctggtggccaacttcaataccctgttcgtgctggcgcaggtggcgatcattctggtgttcatctacctggtggtgcgcggcctgcacaacggcgaggggatgggcacggtgtggagcttgcggccgttcctcagcgagaatgcgcacctgctgccgatcattaccggcgccactatcctgtgcttctcgttcctcggctttgacgcggtcaccacgctgtgcgaagagacgcccgacgccgccaaggtgatcccgcgcgccatcttcctgaccgcgctgtacggcggggtgatctttatcagcgtgtcgttcttcatccagctgtttttcccgaccattcagcgtttccaccagcccgatgctgcgctgccggagatcgcgctgtacgtcggcggcaagctgttccagtcgatcttcctgtgcgtgacctttatcaacacgctggcatccggcctggcgtcgcacgccagcgtgtcgcgcctgctgtacgtgatggggcgtgacaacgtgttcccggagaaattcttcggctacatccaccctaaatggcgcacgccggcgctcaacgtgctgatggtcgggctggtggcgctgtcggcgctgtcgttcgatctggtgaccgccacggcgctgatcaactttggcgcgctggtggcctttaccttcgtcaacctgtcggtgatcagccacttcttcattcgcgaagggcgcaacaaaagctggaaggatcgcttcaacttcctgttcctgccgctggtgggggcgctgacggtgggggtgctgtggctgaacctggagaagagttcgctgactatggggctgatctgggcgacgctgggcttcggctatttggcctggctgacccgacgctttcgccagccgccgccgcagctcgagcggcagccgcagcaataa

SEQ ID NO: 7048 - protein, 456 aa, Serratia liquefaciens
  misc_feature (6)..(6): Xaa can be any naturally occurring amino acid
MTIKAXDGGPAGKPQLRKSLKLWQVVMMGLAYLTPMTVFDTFGIVSGLTDGHVPTSYLLALAGVLFTAISYGKLVRQFPTAGSAYTYAQKAINPHVGFLVGWSSLLDYLFLPMINTLLAKIYLTALFPEVPPWVWVVGFVILITAINLKSVNLVANFNTLFVLAQVAIILVFIYLVVRGLHNGEGMGTVWSLRPFLSENAHLLPIITGATILCFSFLGFDAVTTLCEETPDAAKVIPRAIFLTALYGGVIFISVSFFIQLFFPTIQRFHQPDAALPEIALYVGGKLFQSIFLCVTFINTLASGLASHASVSRLLYVMGRDNVFPEKFFGYIHPKWRTPALNVLMVGLVALSALSFDLVTATALINFGALVAFTFVNLSVISHFFIREGRNKSWKDRFNFLFLPLVGALTVGVLWLNLEKSSLTMGLIWATLGFGYLAWLTRRFRQPPPQLERQPQQ

SEQ ID NO: 7049 - DNA, 1260 bp, Serratia fonticola
  misc_feature (673)..(673): n is a, c, g or t
atgaaccgcgaaactaaaaaatattacgtgctgctcagcggcctgctgttcttctttttcttcacctggtctgccagcttttcgctgatctcgctgtggctgaatcagaagatcggcctgaaaggcgccgagaccggcctgatcttctccgccatctcgttggtggcgctgtgcgcacagccgctgtacgggtttattcaggacaaacttgggctgcgcaagcacctgctgcagtttctcggcgtgatgctgctgctgaccggcccgttctttatctacgtttacgccccgctgctggcgagcagcctgccgctcggtgcgctggtcggcggggtatttatcggcgccaccttcttcgccggcatcggcgcgctggaatcttataccgagcgagtcagccgcatcagcggtttcgaattcggccgcgcccgcatgtggggatcgctcggctgggccagcgccacctttttggccggttttatcttcaatatcgatccgaacatcaatttctggctggcctctgccgccgccgtgatattcctgttgctgctcagccaggtgcgcgagctgaagccgaacgccatggccggcctggcgttcggcaaaccggaaaatctgcggctgcaggatgcgctggcgctgctgcgtatgccgggcttctgggcgctggtgntgtttgtgctcggtatcagcgtgtacaacgttttcgatcagcaattttcggtctacttcgcctcgcagttcgcttctcgcgaacagggcaacgaaatgtacggcttcctcaactcgctgcaggtcttcctcgaggccggcggcatgttcctggcgccgctgctggtgaaccgcatcggcgccaaacaggggctactgctggccggtggcgtgatggcgctgcgcatgttcggctcaggcttggtcagcggcgcattgatgatctccgccatgaaactgctgcacgccgtagagttgccgatcctgctgatcgctatcttcaaatacatcgccagccgcttcgacagtcgcctctcctcaacgctttacctggtgggctttcagttcatcacccaggtgatggccagcttcctgtcgccgctggcgggctacggttatgaccgcatcggctttgccgacacctatctgctgatggggtgcgcggtcgccgccacgacgcttgtctcctgtttcctgctgcgcggcgaacgttccgccagcgcaaccccctttcaatccgccattaaatcaagcgagtctatccaatga

SEQ ID NO: 7050 - protein, 419 aa, Serratia fonticola
  misc_feature (225)..(225): Xaa can be any naturally occurring amino acid
MNRETKKYYVLLSGLLFFFFFTWSASFSLISLWLNQKIGLKGAETGLIFSAISLVALCAQPLYGFIQDKLGLRKHLLQFLGVMLLLTGPFFIYVYAPLLASSLPLGALVGGVFIGATFFAGIGALESYTERVSRISGFEFGRARMWGSLGWASATFLAGFIFNIDPNINFWLASAAAVIFLLLLSQVRELKPNAMAGLAFGKPENLRLQDALALLRMPGFWALVXFVLGISVYNVFDQQFSVYFASQFASREQGNEMYGFLNSLQVFLEAGGMFLAPLLVNRIGAKQGLLLAGGVMALRMFGSGLVSGALMISAMKLLHAVELPILLIAIFKYIASRFDSRLSSTLYLVGFQFITQVMASFLSPLAGYGYDRIGFADTYLLMGCAVAATTLVSCFLLRGERSASATPFQSAIKSSESIQ

SEQ ID NO: 7051 - DNA, 1287 bp, Serratia marcescens
  misc_feature (1111)..(1111): n is a, c, g or t
atggctggcttaccgaccaacagtaattcaaacgcgctgcagcagctgtatcgcctgttcgaaggccgcggcggcgagcgttcgccgcatgcgctggcgcactggcagcaggcgctgcgcctcggctggccaacgcgcaagcatgaaaactggaaatacacgccgctggagagcctgctggagcagcagttcctcgaaccgcagcccgcgccggtgagcgctgagcagctggaggcgctggcgctcggcatcgatgcctgtcggctggtgtttatcgacggccgctacagcgccgcgctgagcgatggcgatttgggcgaataccagttcgaattgactgcctacggcacgccgcaggcgctgccggagccgatccagccggaaattttcctgcacctgaccgaaagcctggcgcaggaaaccagcctgattcgcttgccggccggcaaggtcccagcccgcccgctgtacctgctgcacatcagcagcggacgcggcgccaccggggaagtgaacaccgtgcatcatcgtcaccatctggagatcgggcgcggggccgaggcggaagtgattgaacactacgtcagcctaggcgaggccgcgcacttcaccggcgcgcgcctgaccgccaacgtggcggacaacgccgggctgttgcactgcaagctggcgtttgagagccagccgagctaccactttgcccacaacgatctggttatcggccgcgacgcgcgggtgaaaagcgacagtttcctgctgggcgccggcctgacgcgccacaacaccagcgcgcagctgaacggcgaaggtgcaaacctggtgatcaacagcctggtgctgccggtgggcaaagagatctgcgatacccgcacctatctggagcacaacaagggctattgcgaaagccgccagctgcataaaaccgtggtcagcgatcgcggcaaagcggtgttcaacggcatgatcaaagtggccaagcacgcgattaaaaccgacggccagatgactaaccataacctgctgttgggcaaggtggcggaagtggataccaagccgcagctggagatctacgccgacgacgtcaaatgcagccacggcgccaccgtggggngcatcgatgaagagcagctgttctatctgcagtcgcgcggcatcgacaaacacgcggcgcagcagatgatcattttcgccttcgccgctgagctcaccgaaggcatcgccaatgacaccatccgggaacgggtgctggcgcgcatcgcccagcgcctgccgggggaggctgaatga

SEQ ID NO: 7052 - protein, 428 aa, Serratia marcescens
  misc_feature (371)..(371): Xaa can be any naturally occurring amino acid
MAGLPTNSNSNALQQLYRLFEGRGGERSPHALAHWQQALRLGWPTRKHENWKYTPLESLLEQQFLEPQPAPVSAEQLEALALGIDACRLVFIDGRYSAALSDGDLGEYQFELTAYGTPQALPEPIQPEIFLHLTESLAQETSLIRLPAGKVPARPLYLLHISSGRGATGEVNTVHHRHHLEIGRGAEAEVIEHYVSLGEAAHFTGARLTANVADNAGLLHCKLAFESQPSYHFAHNDLVIGRDARVKSDSFLLGAGLTRHNTSAQLNGEGANLVINSLVLPVGKEICDTRTYLEHNKGYCESRQLHKTVVSDRGKAVFNGMIKVAKHAIKTDGQMTNHNLLLGKVAEVDTKPQLEIYADDVKCSHGATVGXIDEEQLFYLQSRGIDKHAAQQMIIFAFAAELTEGIANDTIRERVLARIAQRLPGEAE

SEQ ID NO: 7053 - DNA, 882 bp, Serratia marcescens
  misc_feature (265)..(265): n is a, c, g or t
atgcgcaatcgacttcccctcaatgccctgcgggcgttcgaatcctccgctcgccacctgaacttcacccgcgccggtctggagctgcgcgtcacccaggccgccgtcagccagcaggtgcgcatgctggaagaacagctgggcattcagctgttccgccgcctgccgcgcgggctggatctgaccgaagagggccaggcgctgctgccggtattgagcgacgccttcgaccgcatcgaggcggtgctgcagcagttcgaaggcnggcatttccacgaggtgctgacggtggcggtggtcggcaccttcgccgtcggctggctgatgccgcggctggcggcgttccgcacggcgcacccgtttatcgatctgcgggtgctgacccacaacaacctggtcaatctgtcggccgacggcatggatttcgccatccgcttcggcgaaggcctctggcccgccacctgcaatatcaagctgttcgacgcgccgctgacggtgctctgcccgccggcggtcgccgcgcgcctgcgcacgccgcaggatctgcagcacgagcagctgatgcgcacctaccgcaaggatgagtgggagcgctggttcgcggcggcacaggtgacgccgtggcggatcaacggcccggtgttcgactcgtcaaggctgatggtggaaggcgcgatccagtgcgatggcgtggcgctggcgccggtcagcatgttccgccgcgaactggccgccggcgcgctgcagcggccgttcgccgccgaggccgcgctcggcgcctattggctgacccatttgaaatcgcgagatctgacgccggcgatgaaaacctttatcggctggatccgccgggaggcggaggaggaacagcagcagggctag

SEQ ID NO: 7054 - protein, 293 aa, Serratia marcescens
  misc_feature (89)..(89): Xaa can be any naturally occurring amino acid
MRNRLPLNALRAFESSARHLNFTRAGLELRVTQAAVSQQVRMLEEQLGIQLFRRLPRGLDLTEEGQALLPVLSDAFDRIEAVLQQFEGXHFHEVLTVAVVGTFAVGWLMPRLAAFRTAHPFIDLRVLTHNNLVNLSADGMDFAIRFGEGLWPATCNIKLFDAPLTVLCPPAVAARLRTPQDLQHEQLMRTYRKDEWERWFAAAQVTPWRINGPVFDSSRLMVEGAIQCDGVALAPVSMFRRELAAGALQRPFAAEAALGAYWLTHLKSRDLTPAMKTFIGWIRREAEEEQQQG

SEQ ID NO: 7055 - DNA, 1707 bp, Serratia marcescens
  misc_feature (589)..(589): n is a, c, g or t
atgcgctatgcggacttccccactttagtggacgcgttggattacgcggcactgggcaatacgggaatgaatttttacgaccgtcgcaatcaactcgtgaccgttctcgaatatcgcacgctgcagcaaaaagcgatctcgggcgcgcggcgtttattgtccctgaaactcaagaaaggcgatcgcgtggcgcttatcgccgaaaccagcgcgggattcgtcgaagcctttttcgcttgccagtacgccggcctggtggcggtgccgctggcgatcccgatgggcgtgggccagcgcgactcctacaccgccaagctgaaggggctgatcgccagctgcaaccccgcggcgatcgtcagcagcgaagagtggacgccgctgatcgcctcagccacggaaaacacctcggcgctgcacatcctcagcgatgcggattttaacgccttgccggagccggagatcgccttgccggcgccttcgcccgacgatatcgcctatctccaatacacctcgggcagcacccgctttccgcgcggcgtgatcattacccagcgggcggcgatggcgaacctgaacgcgatcagtcgcnacgggatcaagctgcgcgcgggcgaccgctgcgtttcgtggctgcccttctatcacgatatgggcctggtcggtttcctgctgacgccggtggcgacccagctgtccgtcgattacctgcgcacgcaagatttcgccatgcgcccgatgcagtggctgaaactgatcgccaaaaatcgcggcacggtgtccgtcgccccgccgttcggctacgatctgtgcctgcgccgcagcaacgccaaagagctggccgatctggatctttccagctggcgggtcgcgggcgtgggcgccgagccgatcccggccgagctgctcggccagttcggcgaacacttcagcagcatcaacttcgacagcaaagccttcatgccgtgctacggcctggccgagaacaccctggcggtgagtttttccgatccctgctccggcccgcaaaccaacgcggtcgaccgcgatattttggagtacgagggtaaagcggtcgcgcccggcaagaaaacccgcgccgtctcgaccttcgtcaactgcggccgagcgctgcccggccaccgcatcgagatccgcagcgaaaccgggcaaccgctgccggaacgccaggtcggccatatcacgatctccggccccagcctgatgaacggctatttctgcgacgacgagtcccagcagcaaattcaggtgaccggctggatggataccggcgatctgggctacctgctggacggctatctgtacgtcaccggccgcaagaaggatttgatcatcattcgcggccgcaatatctggccgcaggatatcgagtacgtcgcggaatccgaaccggaaatccgttccggcgatgcgatcgccttcgtaaccgaagagcacgacgaagcggccaggatcattttgcaaatccagtgccgagtcagctcggaagaacgccgggaacaaatcgtgcgttcgctgagcgcgcgcattcaaagcgagttcggcatcgcggtggacatcgagctgctgccgccgcacagcattccccgcacgtcgtcgggcaaacccgcgcgcgcggaggccaaaaaacgctggctgagcgcctcgctctacccgcacatgccgcagctggccggtttcgcgcaatga

SEQ ID NO: 7056 - protein, 568 aa, Serratia marcescens
  misc_feature (197)..(197): Xaa can be any naturally occurring amino acid
MRYADFPTLVDALDYAALGNTGMNFYDRRNQLVTVLEYRTLQQKAISGARRLLSLKLKKGDRVALIAETSAGFVEAFFACQYAGLVAVPLAIPMGVGQRDSYTAKLKGLIASCNPAAIVSSEEWTPLIASATENTSALHILSDADFNALPEPEIALPAPSPDDIAYLQYTSGSTRFPRGVIITQRAAMANLNAISRXGIKLRAGDRCVSWLPFYHDMGLVGFLLTPVATQLSVDYLRTQDFAMRPMQWLKLIAKNRGTVSVAPPFGYDLCLRRSNAKELADLDLSSWRVAGVGAEPIPAELLGQFGEHFSSINFDSKAFMPCYGLAENTLAVSFSDPCSGPQTNAVDRDILEYEGKAVAPGKKTRAVSTFVNCGRALPGHRIEIRSETGQPLPERQVGHITISGPSLMNGYFCDDESQQQIQVTGWMDTGDLGYLLDGYLYVTGRKKDLIIIRGRNIWPQDIEYVAESEPEIRSGDAIAFVTEEHDEAARIILQIQCRVSSEERREQIVRSLSARIQSEFGIAVDIELLPPHSIPRTSSGKPARAEAKKRWLSASLYPHMPQLAGFAQ

SEQ ID NO: 7057 - DNA, 1287 bp, Enterobacter cloacae
  misc_feature (278)..(278): n is a, c, g or t
atgtcgcaatccgtgatccacggcgggctggacgttaaacgcagcctgctggacgccgtcttggccgggctgatcgccctgatcgtgttcgggccgatcgtcggcatcgtgctgaacggctacagctttaacttcgaaccgcaccggctggtgtggattatcatcgcggtgatggccgggcggctgctgctgagcctgttcctgcaaaccgcgccggggcgcagggtgctggcgcgcttcgacggcggcaacgacggcgtttacgtgcggccgctggnctataaatccaacctgcgctggctcctgccgctgatggcggcgatcgcgctgctgttcccgttcgtcgccaccaaatacctgctgacggtggcgatcctcggcctgatctacgtgctgctcggcctggggctgaatatcgtggtcgggctggcggggctgctcgatctggggtacgtggcgttttacgccatcggcgcctacgggctggcgctgggctatcagtacctcgggctggggttttgggcgatgctgccgctgggggcgctgatggcggcgctggccggcgcgctgctgggtttcccggtgctgcgcatgcacggcgactacctggcgattgtcacgctggggttcggtgagatcatccggctggtgctgaacaactggatgtcgctcaccggtgggccgaacggcgtctcggtgccggcgccgacggtgttcggcctggagttcggccgccgcgccaaagacggcggggtgccgatccacgagtttctcggcatcgattacaaccccaacctcaagttcatcttcatctacgcggtgctgtttttggtggtgctgctggtgctgtacatcaagcaccggctgacgcgcatgccgatcggccgcgcctgggaggcgctgcgcgaggatgagatcgcctgccgctctctcgggctcaatcacgtgctggtgaagctgtcggcctttatgctgggcgcctccaccgccgggctggcgggggtgttttttgccacctatcagggcttcgtcaacccgacctcgttcaccttcttcgagtcggcgctgatcctggcgatcgtggtgctgggcggcatgggctccaccctcggcgtggtgctggcggccttcgtgctgacggtggcgccggagctgctgcgcagcttcgccgaataccgggtgctgctgttcggcgtgctgatggtggcgatgatgatctggcggccgcgcgggctggtgcgcatcagccgcgccagcttcgccgagcgcaagggggtggcgccatga

SEQ ID NO: 7058 - protein, 428 aa, Enterobacter cloacae
  misc_feature (93)..(93): Xaa can be any naturally occurring amino acid
MSQSVIHGGLDVKRSLLDAVLAGLIALIVFGPIVGIVLNGYSFNFEPHRLVWIIIAVMAGRLLLSLFLQTAPGRRVLARFDGGNDGVYVRPLXYKSNLRWLLPLMAAIALLFPFVATKYLLTVAILGLIYVLLGLGLNIVVGLAGLLDLGYVAFYAIGAYGLALGYQYLGLGFWAMLPLGALMAALAGALLGFPVLRMHGDYLAIVTLGFGEIIRLVLNNWMSLTGGPNGVSVPAPTVFGLEFGRRAKDGGVPIHEFLGIDYNPNLKFIFIYAVLFLVVLLVLYIKHRLTRMPIGRAWEALREDEIACRSLGLNHVLVKLSAFMLGASTAGLAGVFFATYQGFVNPTSFTFFESALILAIVVLGGMGSTLGVVLAAFVLTVAPELLRSFAEYRVLLFGVLMVAMMIWRPRGLVRISRASFAERKGVAP

SEQ ID NO: 7059 - DNA, 570 bp, Enterobacter cloacae
  misc_feature (436)..(436): n is a, c, g or t
atgagcatatatgtcaacaacggcgccctgggcgccatggaacacacgggaacggcggcgagcggtctggcgctcagcgtgccggtcgcggcgggcgccttgctgctgaagaccgaaagcctgctgggcatcggcgcaacgctgatgctgctaacggcattggcgctggcgtttctcggcggcgccgcgctggcccgctggcagccgctgaggaagcggcctgcgctggctatgctccgctacggttttttgctggcggcggcggggtggctattgacgctgctgatgctgttcggcggccatgattggccggccctgctggcgggcatcgccctcggcggcctggggcagggcgtggcctaccgcacggcggtaggggaaggggcgttcgctgtggcgtgcaggctggcgacggtggtgaccatcgtggccgtgntggttgccgcgttgctgattcaaacctacgccgcgccgggcgcgagaggaggctgtttcgcgctggcgttgctggtcgatctggcgctgttgggggcgttgatggcgcgggttgcggagcgggatggcgcctga

SEQ ID NO: 7060 - protein, 189 aa, Enterobacter cloacae
  misc_feature (146)..(146): Xaa can be any naturally occurring amino acid
MSIYVNNGALGAMEHTGTAASGLALSVPVAAGALLLKTESLLGIGATLMLLTALALAFLGGAALARWQPLRKRPALAMLRYGFLLAAAGWLLTLLMLFGGHDWPALLAGIALGGLGQGVAYRTAVGEGAFAVACRLATVVTIVAVXVAALLIQTYAAPGARGGCFALALLVDLALLGALMARVAERDGA

SEQ ID NO: 7061 - DNA, 834 bp, Serratia marcescens
  misc_feature (516)..(516): n is a, c, g or t
atggcatctgcaaaaacgattttaatcaccggcgtcagcagtggctttggccaggcgctggcgcgggaagccctcgccgtagggcatcgggttgtaggaacggtgcgcaacagcgaagcactgcaggctttcgccgcgctcgatacgcagcacgcttttggctatctgcttgatgtcacggacgttgagcgtattgatgaggtggttggagagattgagtccgccgtcggcccgatagatgtgctggtgaacaatgccggttacggccacgaaggcattctggaagaatccccgcttgcagagctgcgccgccagtttgacgtcaatgtgtttggcgcggtggcgatgatcaaagccgtgctgccgggcatgcgccagcgccgttgcggccacattatcaatatcacctcaatgggcagcttcattaccttgcccggcatcagctattactgcggcagcaaatttgcactggaagggatatcagaaaccttaagcaaggagcttgccccgttcaanctacacgtgaccgccgtggcgccgggctcgtttcgaacgaactgggccgggcgttcaatggtacgcagccctcgctgtctcccggactatgacgcgttatttgaacctgttcgtcaggcgcgtcaggaaaaaagcggcaagcaactcggcgatcccgtgaaggcggctcacgccatgctggcagtgatcgagagccggaacccacccacgcatctgttgttaggcagtgacgcattaagtttggtgcggcaaaagctcgaggcgttaggtcaggaaattgaacaatgggagaaacttacccgttcaacggatggctga

SEQ ID NO: 7062 - protein, 277 aa, Serratia marcescens
  misc_feature (172)..(172): Xaa can be any naturally occurring amino acid
MASAKTILITGVSSGFGQALAREALAVGHRVVGTVRNSEALQAFAALDTQHAFGYLLDVTDVERIDEVVGEIESAVGPIDVLVNNAGYGHEGILEESPLAELRRQFDVNVFGAVAMIKAVLPGMRQRRCGHIINITSMGSFITLPGISYYCGSKFALEGISETLSKELAPFXLHVTAVAPGSFRTNWAGRSMVRSPRCLPDYDALFEPVRQARQEKSGKQLGDPVKAAHAMLAVIESRNPPTHLLLGSDALSLVRQKLEALGQEIEQWEKLTRSTDG

SEQ ID NO: 7063 - DNA, 834 bp, Serratia marcescens
  misc_feature (556)..(556): n is a, c, g or t
atggcatctgcaaaaacgattttaatcaccggcgtcagcagtggctttggccaggcgctggcgcgggaagccctcgccgtagggcatcgggttgtaggaacggtgcgcaacagcgaagcactgcaggctttcgccgcgctcgatacgcagcacgcttttggctatctgcttgatgtcacggacgttgagcgtattgatgaggtggttggagagattgagtccgccgtcggcccgatagatgtgctggtgaacaatgccggttacggccacgaaggcattctggaagaatccccgcttgcagagctgcgccgccagtttgacgtcaatgtgtttggcgcggtggcgatgatcaaagccgtgctgccgggcatgcgccagcgccgttgcggccacattatcaatatcacctcaatgggcagcttcattaccttgcccggcatcagctattactgcggcagcaaatttgcactggaagggatatcagaaaccttaagcaaggagcttgccccgttcaaactacacgtgaccgccgtggcgccgggctcgtttcgaacgnactgggccgggcgttcaatggtacgcagccctcgctgtctcccggactatgacgcgttatttgaacctgttcgtcaggcgcgtcaggaaaaaagcggcaagcaactcggcgatcccgtgaaggcggctcacgccatgctggcagtgatcgagagccggaacccacccacgcatctgttgttaggcagtgacgcattaagtttggtgcggcaaaagctcgaggcgttaggtcaggaaattgaacaatgggagaaacttacccgttcaacggatggctga

SEQ ID NO: 7064 - protein, 277 aa, Serratia marcescens
  misc_feature (186)..(186): Xaa can be any naturally occurring amino acid
MASAKTILITGVSSGFGQALAREALAVGHRVVGTVRNSEALQAFAALDTQHAFGYLLDVTDVERIDEVVGEIESAVGPIDVLVNNAGYGHEGILEESPLAELRRQFDVNVFGAVAMIKAVLPGMRQRRCGHIINITSMGSFITLPGISYYCGSKFALEGISETLSKELAPFKLHVTAVAPGSFRTXWAGRSMVRSPRCLPDYDALFEPVRQARQEKSGKQLGDPVKAAHAMLAVIESRNPPTHLLLGSDALSLVRQKLEALGQEIEQWEKLTRSTDG

SEQ ID NO: 7065 - DNA, 1476 bp, Serratia marcescens
  misc_feature (230)..(230): n is a, c, g or t
atgagcaccagcatcagcgctaccctcaaggatcccacgctgttccgcgaggccaattacatcgacgggcaatggttgccggcccaagcaggccgttcgatcgccattcataatcccgccaacggcgagctggtcggccacgtgccggccttcggcgccgaagaaaccgcgcgcgccatcgccgccgccaaaaaagcgctgcccgcctggcgtgcgctgaccgccaaagngcgtgccggcaagctgcggcggctgtttgaactgatgatggaaaatcaggacgatctggcacgcatcatgacggcggaacagggcaaaccgctggctgaaagccgcggtgagatcgcctatgccgcctcctttatcgaatggttcgccgaggaaggcaagcgggtctacggcgacaccattccgcagccgcaggccggtcgccgcattatcgtgcagaaagagccgatcggcgtgttcgccgccatcaccccgtggaacttcccggcggcgatgatcacccgcaaagccggccccggctgggccgccggctgtaccggggtgatccgccccgccagccagacgccgttctcggcgctggcgatcgccgtgctggcggagcgcgccgggctgcccgccggggtgtgcaacgtgatcaccggccccagcaagggcatcggcggcgaactcaccgccaacccggatgtgcgtaaactctccttcaccggcagcaccgaagtcggcgcgcagctgctggcccagtgcgcgcccaccatcaagaaaaccagcatggagctgggcggcaacgcgccgtttatcgtgttcgacgacgccgatctggacgccgccgtggccggcgctgtcgcctcgaaataccgcaacgccggccagacctgcgtctgcaccaatcgttttctggtgcaggacggcgtatacgacgccttcaccgccaaactgaaagccgccgtcgccaagctgaaagtcggcaacgggctggatgagggcgtcaccatcggcccgctgattaacccggacgcagtggagaaagtgcgcgagcatatcgccgacgccgtcgaacacggcgcatcggtgctgctgggcggcaagcctgacgcgctgggcggcaatttcttcaccccgaccatcctgaccgacgtgccgcgcacggcgaaaatcttccgcgaggagacattcggcccggtggcgcccctgatccgcttcagccacgaggccgacgccgtcgaactggccaacgacacgccgttcggcctggccgcttacttctacagccgcgacatcggccgggtgatgcgcgtggccgaagcgctggagtacggcatcgtcggcatcaacgaagggctgatctccaccgaggtggcgccgttcggcggcatgaagcactcaggtttggggcgtgaaggctcaaaatacggcatcgaagactatctcgaaatcaaatacctgtgccttggcggtttgggcgcctga

SEQ ID NO: 7066 - protein, 491 aa, Serratia marcescens
  misc_feature (77)..(77): Xaa can be any naturally occurring amino acid
MSTSISATLKDPTLFREANYIDGQWLPAQAGRSIAIHNPANGELVGHVPAFGAEETARAIAAAKKALPAWRALTAKXRAGKLRRLFELMMENQDDLARIMTAEQGKPLAESRGEIAYAASFIEWFAEEGKRVYGDTIPQPQAGRRIIVQKEPIGVFAAITPWNFPAAMITRKAGPGWAAGCTGVIRPASQTPFSALAIAVLAERAGLPAGVCNVITGPSKGIGGELTANPDVRKLSFTGSTEVGAQLLAQCAPTIKKTSMELGGNAPFIVFDDADLDAAVAGAVASKYRNAGQTCVCTNRFLVQDGVYDAFTAKLKAAVAKLKVGNGLDEGVTIGPLINPDAVEKVREHIADAVEHGASVLLGGKPDALGGNFFTPTILTDVPRTAKIFREETFGPVAPLIRFSHEADAVELANDTPFGLAAYFYSRDIGRVMRVAEALEYGIVGINEGLISTEVAPFGGMKHSGLGREGSKYGIEDYLEIKYLCLGGLGA

SEQ ID NO: 7067 - DNA, 2067 bp, Serratia fonticola
  misc_feature (220)..(220): n is a, c, g or t
atgcagcagttacacagttatctttctggcgcctgggtgtacgggcagggagaggcgcgcgagatccgccacgcggtgaccggcgaagcgctgtaccaggtctgctctgacggcctgccgttggcggcgagcctggactatgcccgcagccgcggcggcccggcgctggcgcacatgacgttccagcagcgcgcccagatgctgaaagcggtagccaaanacctgctggcgcataaagaggcgctgtatcagatttcctatcaaaccggggcgacgcgcagcgacggctgggtcgatatcgagggcggcatcgccacgctgttcgcctatgccggcatggccggccgcgatctgccggacgataccctgtggccggaagacgagctgatcccattgtcgaaacaggcgcagttcgccgcccgccacgtgctcacttcacgccccggcgtggcgctgcacatcaacgccttcaacttcccgtgctggggcatgctggagaaactggcgccgacctggctggcgggcatgccggccatcatcaagccggcaaccgccaccgcgcagctgacgcaggcgatggtcaggctgatcgtcgatagcggcctggtgccggaaggggcgctgcagctggtttgcggcggcgtcggcgacatgtttgcgcacctggattaccaggatgcggtgactttcaccggttcggcgcagaccgggcagcggctgcgggcacacccgcgcctgctggagaaatcgatcgcgttcaccatggaggcggattcgctcaactgctgcgtgctggcagaagacgtgacgccggaaatgccggagtttgcgctgttcatcaaagaagtgtgccgtgaaatgaccgccaaggcggggcagaaatgcaccgcgatccgccgcatcatcgtgccggcggcgcaggtggcggcggtgcgtcaggccttgctgcagcgcctggcgggggtgacggtgggcgacccgcagctggagcaggtgcgcatgggggcgttggtcagccatgagcagcgtgatgatgtgcaaagcaaggtggagttcctgctgcgcaacggctgcgaaccgctctgtggcgcggcgctggataagctggaggtgctgggcgacggcgcgcgcggcggggcgttttatccgccgaccctgctgtattgcgccgatccgttcacccatcaggcggtgcacggcaccgaggctttcggcccggtggcgacgctgatgccgtatgcggataccgaacaggcgatcgcgttggcgttgctggggcagggcagcctggcgggctcgctggtgaccgccgatccggcattggccacgcgcttcattcgcgcggcggcctgcgcccacggccgcatgttgattttggatgagcgggcggcggcggagtccaccggccacggttcgccgctgccgatgctggtgcacggcggcccggggcgcgccggcggcggtgaagagctgggcgggctgcgcgcggtgaaacactatatgcagcgcacggcgatccagggcagcccggcgatgctggcggccatcggcggcgaatgggtgcgcggcgcgccggtcgccgagcatccggtgcatccgttccggaaatacttcgagcagctgcagctgggcgatagcctgttgaccgcgcgccgcaccgtgaccgaagcggatatcgtcaacttcgcttgcctgagcggcgaccatttctacgcgcacatggacaagatcggcgccgccgactcgctgttcggcgagcgggtggcgcacggttactttgtggtgtccgccgcggccgggctgtttgtcgacgccgccgtcgggccggtgatcgccaactacggcatggaaaatctgcgctttatcgagccggtgaagatcggcgataccattcaggtgcggttgacctgcaaaaagaaaatccgcaaaccgcagaaaaccgccgaagatcgcccgcacggcgtggtggtgtgggatgtgcaggtgttgaatcagcaacagcagccggtggcgctgtacagcattctgacgctggtggcgcgccaacagagggacttcgaagcgtga

SEQ ID NO: 7068 - protein, 688 aa, Serratia fonticola
  misc_feature (74)..(74): Xaa can be any naturally occurring amino acid
MQQLHSYLSGAWVYGQGEAREIRHAVTGEALYQVCSDGLPLAASLDYARSRGGPALAHMTFQQRAQMLKAVAKXLLAHKEALYQISYQTGATRSDGWVDIEGGIATLFAYAGMAGRDLPDDTLWPEDELIPLSKQAQFAARHVLTSRPGVALHINAFNFPCWGMLEKLAPTWLAGMPAIIKPATATAQLTQAMVRLIVDSGLVPEGALQLVCGGVGDMFAHLDYQDAVTFTGSAQTGQRLRAHPRLLEKSIAFTMEADSLNCCVLAEDVTPEMPEFALFIKEVCREMTAKAGQKCTAIRRIIVPAAQVAAVRQALLQRLAGVTVGDPQLEQVRMGALVSHEQRDDVQSKVEFLLRNGCEPLCGAALDKLEVLGDGARGGAFYPPTLLYCADPFTHQAVHGTEAFGPVATLMPYADTEQAIALALLGQGSLAGSLVTADPALATRFIRAAACAHGRMLILDERAAAESTGHGSPLPMLVHGGPGRAGGGEELGGLRAVKHYMQRTAIQGSPAMLAAIGGEWVRGAPVAEHPVHPFRKYFEQLQLGDSLLTARRTVTEADIVNFACLSGDHFYAHMDKIGAADSLFGERVAHGYFVVSAAAGLFVDAAVGPVIANYGMENLRFIEPVKIGDTIQVRLTCKKKIRKPQKTAEDRPHGVVVWDVQVLNQQQQPVALYSILTLVARQQRDFEA

SEQ ID NO: 7069 - DNA, 2184 bp, Enterobacter cloacae
  misc_feature (1597)..(1597): n is a, c, g or t
atgaaacaccggctttccccgctcgcgctcgcgctgctcgtcagctttcccgccgatgccctgctgctgcagcaaggcgacgcgcagtttgaactcgatcccgccacgctgcgcattgccgccggcgctgtgccggtcaatctggcgcagcccgcgcaacaggtggaagatctcaccgcgtcgccacaacgcgccagctggcgctggccgcagagcgcggtcaaggttagcgcccgtctggaaggcggcgatctgcgcctgagcttcagcagcgaccggccacagcttctgaactggtatcgcctgccgccacaaacagaaacgctgctgttgccgatcggcgaaggcagccgcattccgctcgacaacgcggtctggcgccattacctgacggcggaaatgacgccgctggataccaactgggatctgaagctgccgctgtggagccagcagcaccagggcaaggtctacagctggctgatgttgacgccgttcagcaaccgggtcaccttcgcctcggcgcaggaaaagctggagatgcgcgccgagcatcagttcaaccgcttcaatcagcaacaggcattcgaggtgctgctgcacgtcggtgacacgccgctgtccggcgcccgccgctatcgcgactatttgcaacagaacggccagttcagcagcctgcacgagaagataaagcaggcgcccgaaggcgaaaagctgatcggcgccacccatgtctacctgtggggggacaaactgctggcggcggaagatgtcaaagattggccggggttgctgcactacctcgcctctcctgccgccgaagcgctgcggcagaagatggatgccgagagcagaaagctcctgctgcagctggcgggcaaaacgccggagggctggcagcaacagcccctgatcgacggcatcaaccaggcgttgacggcgcaaatcccgctgggcgccacgccggatgacgccgactttctgcaggcgcagcagcgccaggccgctgcggtgcgggagcgggcgcagcgagagctggggcgctggctaaccccggcggaccgttgggggcaagggctggccaaaccggtgatcgatgcgctgcgccaggccggcttgccgcgcctgtggttaggcaccgataactggactgccgccttcctgcacccgcaggcggtaaccgccaccaaagcggccggctatctgatcgccagctacgactcctacgataccgccattgcgcgcggcgtgaacgacagctggctcaccgcgcaactgccgacggcactgcgggaaagttgcaccatcgtgcgcgccgacggcagcaagaaacccggcttcggcaagcagggttactacctcaacccgggctgcgtcctgccctattctcaacggcgcatgcgcgagctggtgcaactggccgggttgaacagcctgtttctcgacgtggacggcaccggcatggtctccgacgactatcagcccggccacccgaccggcgcggcgcagatggccgaggcgcgcaacgcccggctggcctggttcagcgccacccttaagctgccgctcggctcggaggacggcaatgcggtgaccgccngcagcctgatgttcgcccacggcatggaaacctggggattcggctggggcgacaagcagatgaatcaggataaatcctcgccctattatctcggcgcctggtggcccaacgcccaaccggcgtttttcttccgccccgccaaggtgaagcagccctaccgcaccgtcgaattcgatccgcgttatcgcctgccgctgtaccaggccgttttccacgatgcgatcgtcagcagccaccactggaattacgacaatctgaagttcagcgacgttcagaccacccgcagtctgctcagccagttgtacaacaccgcgccgatgttccatctgagccgcgccaccctggcggcccgcctgccggcgatcaaacgcgccgacgccgccttccggccgttgcatcaggccctctgggacaaagcgctgaccgacttccgctggctcgatcgggacggctgggtgcagcagacgagcttcagcgacgggtcgacgctgaccgccaacttcagcgcgcggccgttcgccggcgtagcggcccacagcctgcgcgccaaactggccgacggccgcacgttcgacgttgcgccttag

SEQ ID NO: 7070 - protein, 727 aa, Enterobacter cloacae
  misc_feature (533)..(533): Xaa can be any naturally occurring amino acid
MKHRLSPLALALLVSFPADALLLQQGDAQFELDPATLRIAAGAVPVNLAQPAQQVEDLTASPQRASWRWPQSAVKVSARLEGGDLRLSFSSDRPQLLNWYRLPPQTETLLLPIGEGSRIPLDNAVWRHYLTAEMTPLDTNWDLKLPLWSQQHQGKVYSWLMLTPFSNRVTFASAQEKLEMRAEHQFNRFNQQQAFEVLLHVGDTPLSGARRYRDYLQQNGQFSSLHEKIKQAPEGEKLIGATHVYLWGDKLLAAEDVKDWPGLLHYLASPAAEALRQKMDAESRKLLLQLAGKTPEGWQQQPLIDGINQALTAQIPLGATPDDADFLQAQQRQAAAVRERAQRELGRWLTPADRWGQGLAKPVIDALRQAGLPRLWLGTDNWTAAFLHPQAVTATKAAGYLIASYDSYDTAIARGVNDSWLTAQLPTALRESCTIVRADGSKKPGFGKQGYYLNPGCVLPYSQRRMRELVQLAGLNSLFLDVDGTGMVSDDYQPGHPTGAAQMAEARNARLAWFSATLKLPLGSEDGNAVTAXSLMFAHGMETWGFGWGDKQMNQDKSSPYYLGAWWPNAQPAFFFRPAKVKQPYRTVEFDPRYRLPLYQAVFHDAIVSSHHWNYDNLKFSDVQTTRSLLSQLYNTAPMFHLSRATLAARLPAIKRADAAFRPLHQALWDKALTDFRWLDRDGWVQQTSFSDGSTLTANFSARPFAGVAAHSLRAKLADGRTFDVAP

SEQ ID NO: 7071 - DNA, 1887 bp, Serratia fonticola
  misc_feature (871)..(871): n is a, c, g or t
atggacagtaaacttttagactattacaaccgcgagctggcctatctgcgcgagatgggcgccgagttcgccgaacagtacccgaaggtcgcgggccgtctcggcatgcgcggcatcgacgtggcggatccttatatcgagcgcctgatggagggcttcgccttcctcacctcgcgcgtgcagctgaaaatggacgccgagtttccgcgcttttctcagcgcttgctggagatcatctaccccaactacctgtcgccgacgccgtcgatggcgatcgccgaactgcagccggacagcagcaaaggtgacatcagcaacggcttcgtggtgccgcgcggcaccatgatggacagccagacgctgaagaaaagcggcatcacctgcagctacgccaccgcccatgacgtcacgctgcagccggtgcgcatcgccgccgtcgagctgggcggcattccggccgatatcccgttggcctcgctggggctgcagcacagcggctgcgtcagcgcgctgcgcattcgtctcgagtgctacgaaagcgtgacgctcaacaacctgcagctggatcagctgatgttttacctggccgggccggacatgcaggcgcagcagctgctggaactgctgatgcagcacagcgtcgggcttgtctgccaaacggtggaggcgcagccgcagcggcgggcgctggcgctggacgggctgcggcaggagggcttcgccgccgatcaggcgctgctgcccaacgacctgcgcaacttcgaaggctatcggttgctgcaggagtacttcgccttcccggcgcgcttccagttcttcagcgtcaacggcctgcgtccgctgctgcagagcgtgcgcgaagggaaaaagncgctgcgccagttcgaaatcgtggtgctgctggatcggcacgacgccgcgctggaacgggtggtcgacgccgcccatttggcgctgcactgcacgccggtgatcaacctgtttccgaaggtcgccgaacgcatcgcgatcaacgaaaaaaaccacgaataccatctggtggtcgacaatatccggccgctggattacgaagtgttctcggtgcagcggctcggcggcagcgccagcgaaaaacgctacgagcaagagtttcggccgttttacagcaccctgagcgcggacgatggcaactatggcgcctacttctcgctgcggcgcgaacagcgcacgctgtcggagcacgcccgccgctacggcacccgcaccggctatgccggttcggaagtgttcgtgtcactggtggacgagcggcaatcgccgtggcacagcgatctgaaatacctcaccgccgacgtgctgtgcaccagccgcgacctgccgttgatgttgctgcaacaggatcagggcaacttcgtgatgcccgattcgatcccgatcaagcaggtctcgctgcgcaaaggccccaccccgccgcgcccggcgctggccgaaggcatgatcacctggcggctgatcagccagctgcagctgaactacctcagcatgatggacggcgatccggaacagggcgccgccagcctgcgccagctgctggggctgtacggcaacctgagcgagccggcgatcgccaaacagattcagggcgtgcgccactgcaacctgcggccggtctatcggcgagtgccggagccgggccccatcgtgttcgcgcgcggcatcgccatcgatctgacggtcgatgagcaagcgttctccggcaacagcccttatctgctcggcagcgtgctggagcgcctgttctcgcgcctggtggcgatgaacaccttcaccgagatgacgctctccagccagcagcgcggcgaaatcgcccactggcaggcacgcatgggcaaaaggacgctgatatga

SEQ ID NO: 7072 - protein, 628 aa, Serratia fonticola
  misc_feature (291)..(291): Xaa can be any naturally occurring amino acid
MDSKLLDYYNRELAYLREMGAEFAEQYPKVAGRLGMRGIDVADPYIERLMEGFAFLTSRVQLKMDAEFPRFSQRLLEIIYPNYLSPTPSMAIAELQPDSSKGDISNGFVVPRGTMMDSQTLKKSGITCSYATAHDVTLQPVRIAAVELGGIPADIPLASLGLQHSGCVSALRIRLECYESVTLNNLQLDQLMFYLAGPDMQAQQLLELLMQHSVGLVCQTVEAQPQRRALALDGLRQEGFAADQALLPNDLRNFEGYRLLQEYFAFPARFQFFSVNGLRPLLQSVREGKKXLRQFEIVVLLDRHDAALERVVDAAHLALHCTPVINLFPKVAERIAINEKNHEYHLVVDNIRPLDYEVFSVQRLGGSASEKRYEQEFRPFYSTLSADDGNYGAYFSLRREQRTLSEHARRYGTRTGYAGSEVFVSLVDERQSPWHSDLKYLTADVLCTSRDLPLMLLQQDQGNFVMPDSIPIKQVSLRKGPTPPRPALAEGMITWRLISQLQLNYLSMMDGDPEQGAASLRQLLGLYGNLSEPAIAKQIQGVRHCNLRPVYRRVPEPGPIVFARGIAIDLTVDEQAFSGNSPYLLGSVLERLFSRLVAMNTFTEMTLSSQQRGEIAHWQARMGKRTLI

SEQ ID NO: 7073 - DNA, 1050 bp, Enterobacter cloacae
  misc_feature (1021)..(1021): n is a, c, g or t
atgttatatcaactgagcgtgatatttatgctggcggtcgcctgggtgcttattgcccgccgggccgccttgacggtgggattggtggataagcccaatgcgcgcaagcaacatctgggacatattccgctggtcggcggcatcgccgtatacctgacgctgatgctgatgacgctgtggcaacccgcctggctgcccgacagcaccatctatctgctgtgcattacggcgctggtggtgttgggcgtgctggatgaccgctttgatctgcctgtggcgccgcgcgtcatggtgcagggagggatcgcgctggcgatgatgctggcggcagggatgcagctttcctcattgggctatgtctgggggcatcaggaagtgatgctcggctatggcgcgttgctgcttacgccgctggcggtatggggagcgatcaacgcctacaacatggtggatggcatcgacgggcaactgggcgccttgtcctgcgttaccttcgttgcattggccatcgtgttcggattgggcggccgggaagatctggcgctgtggtgcctgggcctgatcgctgcgctggcggcttatctgctgttcaacctgagcctgttcggcgcgcgcaacaagatctttatgggggacgccggcagcatggtgatcggcttcagcgtgctgtggctggtgttgctggcgactcaggggccgcaggcggtaatgcgcccggtcaccgcgctgtggctgatcgccattccgctgatggacatggtgaccgtgatggtgcgccgcctgttgcgccgccaaagccccttcaaagcgggccgcgatcatttgcaccacattctgatgcgtcgcgggctcaatgcgcgccaggcgctggcgatgagcaccatgctggcggtgacgctggcctgcgtcggcatttgcagcgaagtgctgcagctgcaggaaagcctgatgctggtggcgtttctgttttgtttctgcggttatttcgccatgttgcgcgaaccgcgtcaggcgacggtgntcagcgataatccgaccgtcggccgttaa

SEQ ID NO: 7074 - protein, 349 aa, Enterobacter cloacae
  misc_feature (341)..(341): Xaa can be any naturally occurring amino acid
MLYQLSVIFMLAVAWVLIARRAALTVGLVDKPNARKQHLGHIPLVGGIAVYLTLMLMTLWQPAWLPDSTIYLLCITALVVLGVLDDRFDLPVAPRVMVQGGIALAMMLAAGMQLSSLGYVWGHQEVMLGYGALLLTPLAVWGAINAYNMVDGIDGQLGALSCVTFVALAIVFGLGGREDLALWCLGLIAALAAYLLFNLSLFGARNKIFMGDAGSMVIGFSVLWLVLLATQGPQAVMRPVTALWLIAIPLMDMVTVMVRRLLRRQSPFKAGRDHLHHILMRRGLNARQALAMSTMLAVTLACVGICSEVLQLQESLMLVAFLFCFCGYFAMLREPRQATVXSDNPTVGR

SEQ ID NO: 7075 - DNA, 972 bp, Serratia marcescens
  misc_feature (919)..(919): n is a, c, g or t
atgatcgagttcggtgatttctatcaacgcatcgccaaaagccccctcagccattggctggacacgctgcctgcgcagctgagcgcctggcaacgcgaatcgctgcacggcaaattcaaacagtggttcaactcggtcgagcatttgccgacgctgaccccaacccgcctcgatctgctgcacggcgtgcgcgccgagatggagccgggcctgtcgccgggccagcttgaaggcatcgagaaaatgctgcgcaccctgatgccatggcgtaaagggcccttctcgctgtatggcatcgatatcgataccgaatggcattccgactggaagtgggatcgcgtgctgccgcacatttctccgctggccggccgcaccattctcgacgtcggctgcggcagcggttatcacctgtggcgcatgattggcgccggcgcacacctcgccgtcggcatcgatccgatgcagctgttcctgtgtcagttcgaagcggtgcgcaagctattaggcggcgatcagcgcgcccacctgctgccgctcggcatcgagcagttgccggaattggcggcattcgacaccgtgttctcgatgggggtgctgtatcaccgccgctcgccgctcgatcatctgtatcagctgaaaaaccagctggtggctgaaggtgaactggtgctggaaacgctggtggtggaaggcgatcgccaccaggtgctggtgccgggcgatcgttatgcgcagatgcgcaatgtgtatttcatcccttccgccgaggcgctgaaatgttggttggagaagtgcggcttcgtcgacgtgaagatcgccgatatgtgcgtcaccagcctcgaagagcagcgccgcaccggctggatgaccagcgaatcactggccgaattcctcgatccgagcgatcgcagcaaaacgntcgaaggctatccggcgcccctgcgcgccgtgctgaccgccaaaaagccctag

SEQ ID NO: 7076 - protein, 323 aa, Serratia marcescens
  misc_feature (307)..(307): Xaa can be any naturally occurring amino acid
MIEFGDFYQRIAKSPLSHWLDTLPAQLSAWQRESLHGKFKQWFNSVEHLPTLTPTRLDLLHGVRAEMEPGLSPGQLEGIEKMLRTLMPWRKGPFSLYGIDIDTEWHSDWKWDRVLPHISPLAGRTILDVGCGSGYHLWRMIGAGAHLAVGIDPMQLFLCQFEAVRKLLGGDQRAHLLPLGIEQLPELAAFDTVFSMGVLYHRRSPLDHLYQLKNQLVAEGELVLETLVVEGDRHQVLVPGDRYAQMRNVYFIPSAEALKCWLEKCGFVDVKIADMCVTSLEEQRRTGWMTSESLAEFLDPSDRSKTXEGYPAPLRAVLTAKKP

SEQ ID NO: 7077 - DNA, 402 bp, Enterobacter cloacae
  misc_feature (287)..(287): n is a, c, g or t
atgaaaattatcgacgtggtagccgccattctggaacagaacggccgcattttgctggcccagcgcggcgcaggcagcgatcaggccggtctgtgggagtttcccggcggcaaggttgaagccggcgaaagccagccagaggcgctggcgcgcgagctggatgaagagttggggatttgcgcccgtatcggcgagcatgtgggcagcaatcagtggcagcaaggcgaacgcctcatccggctgcatgcctggcgagtcgcggcgttctccggtgaattgcagctgcnttgccactcggcgctggtctgggtcacgccgcaacaggcgcaggaatacgccctggcgcccgccgacgttccactgctggcggactatatcgccgcgcaaggcgatgcgcgctga

SEQ ID NO: 7078 - protein, 133 aa, Enterobacter cloacae
  misc_feature (96)..(96): Xaa can be any naturally occurring amino acid
MKIIDVVAAILEQNGRILLAQRGAGSDQAGLWEFPGGKVEAGESQPEALARELDEELGICARIGEHVGSNQWQQGERLIRLHAWRVAAFSGELQLXCHSALVWVTPQQAQEYALAPADVPLLADYIAAQGDAR

SEQ ID NO: 7079 - DNA, 402 bp, Enterobacter cloacae
  misc_feature (284)..(284): n is a, c, g or t
atgaaaattatcgacgtggtagccgccattctggaacagaacggccgcattttgctggcccagcgcggcgcaggcagcgatcaggccggtctgtgggagtttcccggcggcaaggttgaagccggcgaaagccagccagaggcgctggcgcgcgagctggatgaagagttggggatttgcgcccgtatcggcgagcatgtgggcagcaatcagtggcagcaaggcgaacgcctcatccggctgcatgcctggcgagtcgcggcgttctccggtgaattgcagcngcattgccactcggcgctggtctgggtcacgccgcaacaggcgcaggaatacgccctggcgcccgccgacgttccactgctggcggactatatcgccgcgcaaggcgatgcgcgctga

SEQ ID NO: 7080 - protein, 133 aa, Enterobacter cloacae
  misc_feature (95)..(95): Xaa can be any naturally occurring amino acid
MKIIDVVAAILEQNGRILLAQRGAGSDQAGLWEFPGGKVEAGESQPEALARELDEELGICARIGEHVGSNQWQQGERLIRLHAWRVAAFSGELQXHCHSALVWVTPQQAQEYALAPADVPLLADYIAAQGDAR

SEQ ID NO: 7081 - DNA, 1164 bp, Serratia marcescens
  misc_feature (557)..(557): n is a, c, g or t
atgataaataaaatcatcgaagggtatttaccgcagctcacggctattcggcacgatattcatcagcaccccgaattgggtttcgaagagtttcgcaccagcgatctggtcgcggattatctgagttcgtggggttatgaggtgcaccgcggattggcgggcaccggcgtggtgggcacgctgcgggcgggcgacggcgtgaaaagcctcgggctgcgcgccgatatggatgccttgccgatcgaggagaacaccggcaaaccctggagcagcagcgtggccaaccgcatgcacgcctgcggccatgacggccataccaccatgctgctcggcgccgcccgttacctggcgcatacgcgcaacttcaacggcacgctgcacctgattttccaaccggcggaagagatgctgaacggcggcgcgcgcatggtggaacaggggctgttcgagcgcttcccctgcgacgccatcttcgccatgcacaacatgccgggcatgccgctcggtgagttctttttccagcatggcccgtttatggcctcgatggatcagttcancgtgcgggtgcaggggcgtggcggccacggcgccatcccgcagctgacgatcgatccggtgctggtggcctcgcatatcaccgtttccctgcagagcatcgtctcgcgcaatatcgatccgctggaagcggcggtgatcaccgtcggcagcatcaaggccggtgaggcggccaacgtgatcccggacagcgcggagatgaagctcagcgtgcgctcgctggatcgccaggcgcgcgcaaccttgctggcgcgcattccggcgctgatcgaggcgcaggcggcaagcttcggcgctcacgcggtggtggaacacgttaacggcacgccggtgctggtcaacgacgaagggataacccgtttcgcccaccgcgtggcacagcagcagttcggcgccgctcgcgcgcactatggcgcccggccgctgatgggcagcgaagatttcgccttcatgctcgatgcgcacccgcagggctgttacctgatcatcggcaacggcgatggcgaaggcagctgcatggtgcataacccgggatatgactttaacgacggctgcctggcggccggcagccagtattgggcagcgttggcggaagcgtatttaaaataa

SEQ ID NO: 7082 - protein, 387 aa, Serratia marcescens
  misc_feature (186)..(186): Xaa can be any naturally occurring amino acid
MINKIIEGYLPQLTAIRHDIHQHPELGFEEFRTSDLVADYLSSWGYEVHRGLAGTGVVGTLRAGDGVKSLGLRADMDALPIEENTGKPWSSSVANRMHACGHDGHTTMLLGAARYLAHTRNFNGTLHLIFQPAEEMLNGGARMVEQGLFERFPCDAIFAMHNMPGMPLGEFFFQHGPFMASMDQFXVRVQGRGGHGAIPQLTIDPVLVASHITVSLQSIVSRNIDPLEAAVITVGSIKAGEAANVIPDSAEMKLSVRSLDRQARATLLARIPALIEAQAASFGAHAVVEHVNGTPVLVNDEGITRFAHRVAQQQFGAARAHYGARPLMGSEDFAFMLDAHPQGCYLIIGNGDGEGSCMVHNPGYDFNDGCLAAGSQYWAALAEAYLK

SEQ ID NO: 7083 - DNA, 927 bp, Serratia marcescens
  misc_feature (833)..(833): n is a, c, g or t
atgaacgaagttgcacttccaccacgccgttcgctgccggacgctcaggcatggcgcggcgaaatgagtgatgtcgggctcgattgggtcgggatgcaagggatcgcgctgccgctggagctggccggcaagccactgatggccaaggtcgacgccggcatcaacctgcgcgccgaagcggcgggcgaacgcggcattcacatgtcgcggctgtatctggcgctggacgaattgacgcagggcgagctgacgccgcagcgcctcggccgaacgctgcaggcctttctggattcgcagccggaacacagcgatcgcgccagcctgacgctcagcggcgagctgctgctgtcgcgcccggcgttgctgtcgccgcagcgcggctggaaggcttacccgctgcgcatcgaggccaccctgacggacaggctgacgctggcgctgaccgtcggcgtaccttactcctccacctgtccgagttcggcggcgctcagccgccagctggcgcagcaacagtttcagtttgattttgaacaggcggcggagcggatcagccaacggcaggtgagcgagtggctgttggagcagggaatgccggccacccctcacagccagcgcagctgggcctgggtcaccgtgacgcccgagaatgaacgggcgttcgaaccggtgaaattgatcgaccgcatcgaacacgcgctgggcacgccggtacaaacgctggtgaaacgccgcgacgagcaggccttcgcgctggccaacggtcagaacctgatgttttgcgaagatgcggcgcgccgtctgtatcgcatgctgcgcagccagtgcgattaccncgccttctcgctgcgcgtcgagcatcaggagagcctgcatgcccacaatgcggtggcggagctgagctggcggggagaaaatcatgctgcgtaa

SEQ ID NO: 7084 - protein, 308 aa, Serratia marcescens
  misc_feature (278)..(278): Xaa can be any naturally occurring amino acid
MNEVALPPRRSLPDAQAWRGEMSDVGLDWVGMQGIALPLELAGKPLMAKVDAGINLRAEAAGERGIHMSRLYLALDELTQGELTPQRLGRTLQAFLDSQPEHSDRASLTLSGELLLSRPALLSPQRGWKAYPLRIEATLTDRLTLALTVGVPYSSTCPSSAALSRQLAQQQFQFDFEQAAERISQRQVSEWLLEQGMPATPHSQRSWAWVTVTPENERAFEPVKLIDRIEHALGTPVQTLVKRRDEQAFALANGQNLMFCEDAARRLYRMLRSQCDYXAFSLRVEHQESLHAHNAVAELSWRGENHAA

SEQ ID NO: 7085 - DNA, 3657 bp, Serratia marcescens
  misc_feature (1546)..(1546): n is a, c, g or t
ttgacgatttgtcacccgccacacaaacacgataaagccgcgttcaaaccctctgttagacttttttccattactgcgaaagcgcgctttcgcggctttgagagcaatgaaaaggtaacgccgatgataactacagatggtaataatgcagtcgcttccgtggcctatcgcaccaacgaagtgattgccatctaccctatcacgccgagttccaccatggcggagcaggcggatgcctggtccggcgatggccggcaaaacatctggggcgatatcccccgggtagtggaaatgcagtcggaaggcggcgcgatcgccaccgtgcacggcgcgttgcaaaccggcgcgctgtcgacctcgttcacgtcatcgcagggtctgctgctgatgatcccgacgctgtacaaactggccggcgagctgacgccgtttgtgctgcacgtggccgcgcgcaccgtagccacgcacgcgctgtccatcttcggtgaccactcggacgtgatggcggtgcgccagaccggctgcgccatgctgtgcgccggcagcgtgcaggaggcgcaggacttcgcgctgatctcgcagaccgccaccctcaacgcgcgcgtgccgtttatccatttcttcgacggcttccgcacctcgcacgaaatcaacaagatcgtaccgctcagcgacgatacgctgcggcaaatgctgccgcaggcggcgatcgacgctcaccgcagccgggcgctgtcgccggatcatccggtggtgcgcggcacttccgccaacccggacacctatttccagtcgcgcgaagccaccaacccgtggtatgacgccaccggccagcacgtgatcgacgccatggcagccttcgccgccctcaccggccgccactatcggccgttcgactattacggccacccgcaggccgaacgcgtggtggtggtgatgggctccgccgccggcacctgcgaagaggtgatcgacaccctgctggcccgcggcgagaaagtcggcgtgctgaaagtccggctgttccggccgttctccgccaaatacctgctcgacgcgctgccggacagcgtgcgcagcgtcgcggtgctcgatcgcaccaaagaaccgggcgcgctggccgagccgctgtatctggacgtgatgaccgcgctggcggaagcctacagccggggtgagcgcgccacgctgccgcgggtgatcggcggccgttacggcctgtcgtcgaaagagttcggccccgactgcgcgctggcggtgttccgcgagctggcccagccgcagccgcgcccgcgctttaccgtcggcatcttcgatgatgtcaccgggctttcgctgccgctgagcgacgaaatcctgccgcagcgcgcctcgctggaagcgctgttctacggtttgggcagcgacggctcggtctcggccaccaagaacaacatcaagatcatcggcaacgccacgccgctgtatgcccagggctatttcgtctacgactccaaaaaggccggcggcctgacggtgtcgcacctgcgcgtcagcgaacagccgntcaactcggcctacctggtcagccgcgcggacttcgtcggctgccaccagctgcagtttatcgataagtaccaaatggtcgaacgcctgaagcccggcggcaccttcctgctcaataccccttacggcgccgacgaggtctggtcgcgcctgccgcaggaggttcaggcgctgttgcaccaacgccaggcgcgtttctatatcatcaacgccgccaagctggcgcgcgaatgccggctcggcgcgcgcatcaacaccgtgatgcagatggcgttcttccacctgacgcagatcctgccgagcgacgtggcgctgcaacagctgcaggacgccatcgcccgcagctacagcagcaagggccaggagatcgtcgagcgcaactggcaggcgctgggcgccacccgggccgcgctgaccgagatcccgctgcagccggtcgacgtcagcagcccgatgcgcccgccggtggtctcggacgccgcgccggacttcgtcaaaaccgtcaccgccgcgatgctggccgggctgggcgatgcgctgccggtttccgccttcccaccggacggcacctggccggtgggcaccacccaatgggaaaagcgcaacatcgccgaagcgatcccgatctggcagcccgacctgtgtacccagtgcaaccactgcgtcgccgcctgcccgcactccgccattcgcgccaaggtggttcagccggcggagatggagcacgcccccgcctccctgcagtcgctggatgtcaaagcgcgcgatatgcgcggccagaaatacgtgctgcaggtagcgccggaggattgcaccggctgtaacctgtgcgtcgaggtctgcccggcgaaagatcgccagaacccggagatcaaggccatcaacatggcttcgcgcctcgataatctgacggcggagaaagacaactacgacttcttcctgcagctgccggaaatcgatccggcgcagctggagcgcatcgacattcgcacttcgcagctgatcacgccgctgttcgagtactccggcgcctgctccggctgcggcgaaacgccgtacatcaagctgttgacccagctctatggcgaccgcttgctgatcgccaacgccaccggctgctcgtcgatctacggcggcaacctgccgaccacgccgtacaccaccaacgccgaagggcgcggcccggcgtgggccaactcgctgttcgaagacaacgccgaattcggcctgggcttccgtttaacggtcgatcaacatcgcgcgcgagtgctgcgcctgctgaatgctctggcgccgcagctgccggagcggttggtcaatgccctgcagatgggcgacgtggcgccggagccgcgccgtaagcagatcgccgaactgcgcacgctgttggccaatctagaaggcgaagacgcgcgccagctggcggccggcgccgactacctggtggataaatccatctggctgatcggcggtgacggctgggcctacgacatcggcttcggcggtttggatcacgtcctcagcctgacggagaacgtcaacgtgctggtgctcgacacccagtgctactcgaacaccggcggccagcagtcgaaggccacgccgctcggcgcggtgaccaagttcggcgaacacggcaagcgcaaggcgcgcaaggatttgggcgtcagcatgatgatgtacggccatgtctacgtggcgcagatctcgctgggggcgcagctcaaccaaacggtgaaagcgattcaggaggccgaggcctatccggggccgtcgctgatcatcgcctacagcccgtgcgaagagcacggctacgatctggcgctcagccacgatcagatgaaacagctgaccgccaccggcttctggccgctgtaccgcttcgatccgcgccgcagcgccgagggcaaggccgcattggcgctggattcgcggccgccgaacagcagcctgtcggaaacgctgctgaaagaacagcgtttccgccgcctgaacgcgcagcaaccggaagtggccagcgcgctgtatcaggccgccgagaaagagctgcaggagaaatacgatttcctcagcctgctggccggcaaggcggaaaaatccgccgcagagtaa

SEQ ID NO: 7086 - protein, 1218 aa, Serratia marcescens
  misc_feature (516)..(516): Xaa can be any naturally occurring amino acid
MTICHPPHKHDKAAFKPSVRLFSITAKARFRGFESNEKVTPMITTDGNNAVASVAYRTNEVIAIYPITPSSTMAEQADAWSGDGRQNIWGDIPRVVEMQSEGGAIATVHGALQTGALSTSFTSSQGLLLMIPTLYKLAGELTPFVLHVAARTVATHALSIFGDHSDVMAVRQTGCAMLCAGSVQEAQDFALISQTATLNARVPFIHFFDGFRTSHEINKIVPLSDDTLRQMLPQAAIDAHRSRALSPDHPVVRGTSANPDTYFQSREATNPWYDATGQHVIDAMAAFAALTGRHYRPFDYYGHPQAERVVVVMGSAAGTCEEVIDTLLARGEKVGVLKVRLFRPFSAKYLLDALPDSVRSVAVLDRTKEPGALAEPLYLDVMTALAEAYSRGERATLPRVIGGRYGLSSKEFGPDCALAVFRELAQPQPRPRFTVGIFDDVTGLSLPLSDEILPQRASLEALFYGLGSDGSVSATKNNIKIIGNATPLYAQGYFVYDSKKAGGLTVSHLRVSEQPXNSAYLVSRADFVGCHQLQFIDKYQMVERLKPGGTFLLNTPYGADEVWSRLPQEVQALLHQRQARFYIINAAKLARECRLGARINTVMQMAFFHLTQILPSDVALQQLQDAIARSYSSKGQEIVERNWQALGATRAALTEIPLQPVDVSSPMRPPVVSDAAPDFVKTVTAAMLAGLGDALPVSAFPPDGTWPVGTTQWEKRNIAEAIPIWQPDLCTQCNHCVAACPHSAIRAKVVQPAEMEHAPASLQSLDVKARDMRGQKYVLQVAPEDCTGCNLCVEVCPAKDRQNPEIKAINMASRLDNLTAEKDNYDFFLQLPEIDPAQLERIDIRTSQLITPLFEYSGACSGCGETPYIKLLTQLYGDRLLIANATGCSSIYGGNLPTTPYTTNAEGRGPAWANSLFEDNAEFGLGFRLTVDQHRARVLRLLNALAPQLPERLVNALQMGDVAPEPRRKQIAELRTLLANLEGEDARQLAAGADYLVDKSIWLIGGDGWAYDIGFGGLDHVLSLTENVNVLVLDTQCYSNTGGQQSKATPLGAVTKFGEHGKRKARKDLGVSMMMYGHVYVAQISLGAQLNQTVKAIQEAEAYPGPSLIIAYSPCEEHGYDLALSHDQMKQLTATGFWPLYRFDPRRSAEGKAALALDSRPPNSSLSETLLKEQRFRRLNAQQPEVASALYQAAEKELQEKYDFLSLLAGKAEKSAAE

SEQ ID NO: 7087 - DNA, 2613 bp, Serratia marcescens
  misc_feature (1399)..(1399): n is a, c, g or t
atgaccaggcgattaaaagtattcatagggacggtggcgggctgcgcaattctggtgctggcgttgtggcaaactttgccgcgctggctgccgggcgtgttatcgcattggttgccggcgggaagccgcctggagttgcagggcaaattgcactggcgccagggcggcctggcgctggcgggggcgcgtttcaccgcgcaagattgcctgctggccaacgtcgggccgacgcggttggcttaccgccagggccgctggcagctgtcgagcgataaggtcagcgtcgatagcgcctgtttgtcaaaactgccggccggcgacgccaacagcgcgccgctggcgctcgatcagctgcagcaacagctgccgccgctggatctcaccattaatgacctgacgctggttccctggcagcgctatgccggcaagctgcagctttcctccggccctgacgggcaacgcctgcattatcaggggccgaatctcagcgccgaggcgcagctggatgaaaaacagcagctgacgttgcagagtctgaccgtcgtcccgcccaacagcgcgcaaccgctgcgtctcgccggcaagataaccattccgctggatctggccagcctgccgacgcagggcgcgctgcagggggaaatgcagaccgcctatctggaaaaaccggtattgctggacatgcgctggcaacagcggcagggcgtgttgacggtaagcgaaaaaggcgacgatcggccgctggcggtgctgccgtgggaagtcgcgccgcagcgggtcagcatcaggcagggcgagtggcgttggccgtacagcgggcagccgttgaacggcggcctgagcgttgcgctgcacgactggagcaaagggtgggatgaaacggagatcagcgcgcggctgaacgtgatcaccgccggccacaacggcaagggcaatgcggtgctcaccctcgggccgggcaaggtagggttgaccgacagcgatctgcgcttccaattgaccggtcaggccaatctggccgacttctccgccaccgcgtcgattccgggcgtgatcggcggcagcattctcaacccgacactggtgctgcagccaggggcgctgttgcgcctgtggggcaaggtgacgccggaaatgacgctggaagaggcgcgtttgccgctggcgggcgtgaaggtgaccgccgccggtatcaccggccgcctgcaggcgattctgaacgccagcgacagctattgggggcgcttcaagctgcacctggacggccaggcgcaggatttctggccggacaagggcgactggcagtggcgttactggggcaacggccggttgccgccgctgcaggccgcctgggacgtcgccggcagcgggcgctggcaggatagcgagctggtgctcnacaagctctccaccggtttcgataaattgaagtatggtttggtgacggtcgccgcgccgcgcctgagcctcaaccggccgctgcgctggcggcgtgatgaacaaagcccgcagttcaacggcgagctgcaactggcggcggataaggtcagcttcagcgacggcggccatctgccggcgccggtgctggcgctgcaggtgaacggcctttcgccggacagtttccagctgcagggcaaactgcaggcacagcagatcgggccgatcgcgctgcgcggccgttgggacggcgaacgcctgcgcggtgaagcctggtggccgaaacagtcgctgaaggtcttccagccgctgctcgcgccggatctcaatctcacgctgcgcgacggcgagttttatgcgcagtcggcgttttccgccgcccgcgagcagggcttcgaagccggcggccactgggtggtgaaaaacggcggcatgtggctgaaagacggcgagatgagcggcctggactttatcctgtcgtaccggttcaagcagcatcagtggctgctgggggccaaacagccggtgtcgctgcgcatcaagtctttcagcaacctgttcgagatgcagaacatttccgccgatctgcagggcacctatccttatagcgaagggcagccgctgacgttgagcaacgtcggcgtggacatgctcaacgggcatatcagcctgtcggcgctgcggttgccgcagcatgacgccgcggtgctgaagctggacaaggtcgatctcagcgcgctgtttaccgccctgaagccgaagcagttcgccatgtccggccgggtcgacggtgagctgccgctgttcctgaaccacccgaaatggctggtgcaaaacggctggatcgccaacgccggcaccctgacgctgcggctggacaaagacatggccgacgccatcggcagcaacaacctggcgaccggcgcggcgatcgactggctgcgctacatggaaatcaaccgttcgcacgcccgggtcgatctcgacaacctgggcgaactgacgctgagcgcgcgtatcgacggcatcaacccgcagaagaacgccaagcgcgaggtgatcctgaactatcggcatcaggaaaacgtgtttcagctgtggcgcagtttgcgcttcggcgacaatttacaggagtggctggagcaggccctctcacaacctggggagcaacaatga

SEQ ID NO: 7088 - protein, 870 aa, Serratia marcescens
  misc_feature (467)..(467): Xaa can be any naturally occurring amino acid
MTRRLKVFIGTVAGCAILVLALWQTLPRWLPGVLSHWLPAGSRLELQGKLHWRQGGLALAGARFTAQDCLLANVGPTRLAYRQGRWQLSSDKVSVDSACLSKLPAGDANSAPLALDQLQQQLPPLDLTINDLTLVPWQRYAGKLQLSSGPDGQRLHYQGPNLSAEAQLDEKQQLTLQSLTVVPPNSAQPLRLAGKITIPLDLASLPTQGALQGEMQTAYLEKPVLLDMRWQQRQGVLTVSEKGDDRPLAVLPWEVAPQRVSIRQGEWRWPYSGQPLNGGLSVALHDWSKGWDETEISARLNVITAGHNGKGNAVLTLGPGKVGLTDSDLRFQLTGQANLADFSATASIPGVIGGSILNPTLVLQPGALLRLWGKVTPEMTLEEARLPLAGVKVTAAGITGRLQAILNASDSYWGRFKLHLDGQAQDFWPDKGDWQWRYWGNGRLPPLQAAWDVAGSGRWQDSELVLXKLSTGFDKLKYGLVTVAAPRLSLNRPLRWRRDEQSPQFNGELQLAADKVSFSDGGHLPAPVLALQVNGLSPDSFQLQGKLQAQQIGPIALRGRWDGERLRGEAWWPKQSLKVFQPLLAPDLNLTLRDGEFYAQSAFSAAREQGFEAGGHWVVKNGGMWLKDGEMSGLDFILSYRFKQHQWLLGAKQPVSLRIKSFSNLFEMQNISADLQGTYPYSEGQPLTLSNVGVDMLNGHISLSALRLPQHDAAVLKLDKVDLSALFTALKPKQFAMSGRVDGELPLFLNHPKWLVQNGWIANAGTLTLRLDKDMADAIGSNNLATGAAIDWLRYMEINRSHARVDLDNLGELTLSARIDGINPQKNAKREVILNYRHQENVFQLWRSLRFGDNLQEWLEQALSQPGEQQ

SEQ ID NO: 7089 - DNA, 723 bp, Serratia marcescens
  misc_feature (178)..(178): n is a, c, g or t
atggaacaccccaactctgccccggtgctgattaccggcggcgcgcggcgcatcgggctggcgctcgccagagcgtttctccagcgcggcgttcccgtcatcatcgcctatcgcagcgaatatccggcgatggccgagttgaaagccttgggcgcctgctgcattcagggcgactttnccacgcacgaaggcatctaccgtttcgccgaccaggtgcggcaggtggcgcccaaattgcgcgcggtgatccacaacgccagcgcctggcaggcagagtcgccgcaggtgccgccggaacaggtgatggcgacgatgctgcaaattcacgtctatacgccctatttgctcaaccaactgcttgaaacctgcctgaccggccagggccaggccggcgcggacattatccatctcaccgactacgtggtggaaaaaggcagcgacaaacacatcgcctacgctgccagcaaggccgcgctggacaatatgacccgttcgttcgcccgcaagctggcgccggaggtcaaggtcaacgccattgcgccggcgctgatcatcttcaatcctggcgacgacgaggcttatcgccagcaggcgctggcgaaatcgctgatgaaggtcgcgccgggcgagagcgaagtggtcaacctggtgaactacctgatggagagccgctacgtcaccggccgcacccacggcgtcgacggcggccggccgctgcgctga

SEQ ID NO: 7090 - protein, 240 aa, Serratia marcescens
  misc_feature (60)..(60): Xaa can be any naturally occurring amino acid
MEHPNSAPVLITGGARRIGLALARAFLQRGVPVIIAYRSEYPAMAELKALGACCIQGDFXTHEGIYRFADQVRQVAPKLRAVIHNASAWQAESPQVPPEQVMATMLQIHVYTPYLLNQLLETCLTGQGQAGADIIHLTDYVVEKGSDKHIAYAASKAALDNMTRSFARKLAPEVKVNAIAPALIIFNPGDDEAYRQQALAKSLMKVAPGESEVVNLVNYLMESRYVTGRTHGVDGGRPLR

SEQ ID NO: 7091 - DNA, 1167 bp, Serratia marcescens
  misc_feature (577)..(577): n is a, c, g or t
atgaacgcgtatttctcttacgaggcggattggctgaagcagcgcaacgcctggcacaccgccgcagagatttggcagcagccggatctgtgggccgcgctgcaccggcaattgcaggatcaacaggcgcagtggcagccgttcctggcgccgctgctggccaatccgcgcctgcaaatcgtactgtgcggcgccggcagctcggcgttcgccggccgcgccctggcgccctggctgcgcgaacgaaccggccgcaacgtggcggcctacggcaccaccgatatcgtcgccaatccgttgcagtatctcgaccctgagcggccgacgctgctggtctccttcgcccgctcgggcaacagcccggagagcgtggcgacggtggagctggccgaccagctgctgccggaaagctatcacctgatgctggtctgcaacccggacagccggctggcgcagtatgcgcatcggcgggataacgtctgttcgctggtgatgccgcaaggctccaacgatcaaagcttcgccatgacctccagcttcagctgcatgatgctgagcgccgcgctgttgctcggcncggcttcgctcgaggccgcccaggcgccgctcaacgccatggtgcagcgctgccgtacactgcgcgaaacgctgcagccgcaggtgaaggcgttggccgccagcggtttcctccgttatatcaccctcggcggcagctgttttaccggcctggcggaagaggcctcgctcaagatgctggagctgaccgccggccgcatcgttacacgctacgactcgccgctcggcctgcgccacggcccgaaattcatggtcgacggccagacgttggtggtgctgatgttctcccgcgacgactacgcccgccagtatgaccgcgatctgtggaacgaactgcagcgcgacgggctggcgatgcagttggtcgggttgaccggcgagcgccaacccctgtccgatgccctgctgtatatgcacgacgcggccgatgatatctggctgctgttcccgtatctgctgttcacccagatgctggccttcgagagttcgctgacgctggggctgaccccggacaatccttgcccgaccggcgaggtcaaccgggtggtgaaaggcgtgacgatttaccgttttccttccccggtgctgtaa

SEQ ID NO: 7092 - protein, 388 aa, Serratia marcescens
  misc_feature (193)..(193): Xaa can be any naturally occurring amino acid
MNAYFSYEADWLKQRNAWHTAAEIWQQPDLWAALHRQLQDQQAQWQPFLAPLLANPRLQIVLCGAGSSAFAGRALAPWLRERTGRNVAAYGTTDIVANPLQYLDPERPTLLVSFARSGNSPESVATVELADQLLPESYHLMLVCNPDSRLAQYAHRRDNVCSLVMPQGSNDQSFAMTSSFSCMMLSAALLLGXASLEAAQAPLNAMVQRCRTLRETLQPQVKALAASGFLRYITLGGSCFTGLAEEASLKMLELTAGRIVTRYDSPLGLRHGPKFMVDGQTLVVLMFSRDDYARQYDRDLWNELQRDGLAMQLVGLTGERQPLSDALLYMHDAADDIWLLFPYLLFTQMLAFESSLTLGLTPDNPCPTGEVNRVVKGVTIYRFPSPVL

SEQ ID NO: 7093 - DNA, 1302 bp, Enterobacter cloacae
  misc_feature (560)..(560): n is a, c, g or t
atgaagctatcatcgatcgcgattgcgctttcggccgtgttggcgctggccggctgcgataacagcgccgtcatttcaccggaacaacaaatggggccggatccgacgttgccggcggcgcaagacttcctgatgccgccgatgcaggtgccaaagggcgtcggctggcagcaaaatcagatgccgaaagtggccgaaggcttgaaaatcgataaggtggcggacggtttgctgcacccgcgccagctgcttaacctgcccaacggcgatgttttggtggtggaagccaacgggccgggcaccgaagcggtgagcacgcccaagcagctgatcgccggtttggtgaagggccagtccggtaaaggcggcaaagggggcaaccggattaccctgctgcgcccaaccgccgatggcagctgggaaaagcatatcttcctcgaagggctcgattcgccgttcggcgtccagctgattggcaacaccctgtatgtggccaacaccggcaacatcatgcagtacgcctatcagccgggcgaaacgcgcatcagcgatgcgggtanagagctggccgatctgccggacaccatcaaccatcattggaccaaggccctgctggccagcccggacggtaaaaagctgtatgtcggcgtcggttcaaacagcaacatcaccgaaaacggcctggccgtagagtaccgccgcgccgccgtgctggaagtggacaccgcctccggcgccagccgcatcttcgccagcggcctgcgcaacccgaccgggctgcagtgggaaccgcacagcggcaagctatgggccatcgtcaacgagcgtgacgagatcggcgccgatctggtgccggactacctgacctcggtgcaggacggcggcttctacggctggccttacagctatttcggccagcacgtcgatcggcgggtgcagccggcgcggccggatctggtggcgaaagccatcaagccggactacgccctcagctcccacgtcgcgccgctggggctgctgttctacacggcgaacgctctgccggccgagtatcgcggcggcgccttcgtcagcgaacacggcagctgggatcgctcgccgctgaacggctaccgggtcagctacgtggcgtttgagcaaggcaagccggtcggcaaactcaaagcggtggtcaccggctttgtctccgacgacgagaaggaactctatggcgcaccggtaggattggcggtcgacaagaccggcgccctgctgattgctgatgacgtcggcaacaccgtttggcgcgttaaatcgaaataa

SEQ ID NO: 7094 - protein, 433 aa, Enterobacter cloacae
  misc_feature (187)..(187): Xaa can be any naturally occurring amino acid
MKLSSIAIALSAVLALAGCDNSAVISPEQQMGPDPTLPAAQDFLMPPMQVPKGVGWQQNQMPKVAEGLKIDKVADGLLHPRQLLNLPNGDVLVVEANGPGTEAVSTPKQLIAGLVKGQSGKGGKGGNRITLLRPTADGSWEKHIFLEGLDSPFGVQLIGNTLYVANTGNIMQYAYQPGETRISDAGXELADLPDTINHHWTKALLASPDGKKLYVGVGSNSNITENGLAVEYRRAAVLEVDTASGASRIFASGLRNPTGLQWEPHSGKLWAIVNERDEIGADLVPDYLTSVQDGGFYGWPYSYFGQHVDRRVQPARPDLVAKAIKPDYALSSHVAPLGLLFYTANALPAEYRGGAFVSEHGSWDRSPLNGYRVSYVAFEQGKPVGKLKAVVTGFVSDDEKELYGAPVGLAVDKTGALLIADDVGNTVWRVKSK

SEQ ID NO: 7095 - DNA, 756 bp, Serratia marcescens
  misc_feature (707)..(707): n is a, c, g or t
atgacgcaaccactgcccctgactccgccggcatttgaagcggcgctgcgcgccaaaggcgcttattaccatattcaccacccgtaccacatcgcgatgcacaacggcgaagcgacccgcgaacagatccagggctgggtggccaaccggttctactaccagaccagcattccgatcaaagacgcggcgatcatggccaactgcccacagccggaaacccgccgcaaatgggtgcagcgcatcctggatcacgatggctacggcggcagcgaaggcggcatcgaagcctggctgcgcctgggcgaagccgtcgggctgcagcgcgacgccctgctctctgaagaattggtgctgccgggcgtgcgcttcgcggtggacgcctacgtcaatttcgcgcgccgcgcctgctggcaggaagcggcctgcagctcgctgaccgaactgttcgcgccgcaaatccaccaatcgcgcctcgacagctggccgcagcactacccgtggatcgacgccgccggctacgactatttccgcagccgcctcggccaggccaaccgcgatgttgaacacggcctggcgctggcgctggactattgcgacaccgtagaaaaacagcagcgcatgctggagatcctgcagttcaagctggacattctgtggagcatgctggacgccatgagcatggcctataccctgaaccgcccgccttnccacagcgtgaccgccgcgcgggtatggcacaaccagaggctggtgtaa

SEQ ID NO: 7096 - protein, 251 aa, Serratia marcescens
  misc_feature (236)..(236): Xaa can be any naturally occurring amino acid
MTQPLPLTPPAFEAALRAKGAYYHIHHPYHIAMHNGEATREQIQGWVANRFYYQTSIPIKDAAIMANCPQPETRRKWVQRILDHDGYGGSEGGIEAWLRLGEAVGLQRDALLSEELVLPGVRFAVDAYVNFARRACWQEAACSSLTELFAPQIHQSRLDSWPQHYPWIDAAGYDYFRSRLGQANRDVEHGLALALDYCDTVEKQQRMLEILQFKLDILWSMLDAMSMAYTLNRPPXHSVTAARVWHNQRLV

SEQ ID NO: 7097 - DNA, 1431 bp, Enterobacter cloacae
  misc_feature (611)..(611): n is a, c, g or t
atgaccacgcatctggtctggttgcgtaacgatctgcgtatcaccgacaacaaagccctgcacgccgcctgcagcgatcccgaagcccgggtgctggcggtgtttatcgccacaccgcagcagtggcggcaacatgagatggcgccgcggcaggcggcgctgatccatgccagcctgcaggcggtgcagcaggcgctggcgcacaagggcattgcgctgcattgccattcctgtgcggactttgccgcgtcgatcgactggctggcggactattgcgagcgagagcaggtggatgcgctgttttacaatcgccagtacgaactgaacgaacggcggcgcgatgcgcggctggaacagcggttgagtggccgggtgaggtgtcacggtttcgatgacagcctgctgttgccgccaggcagcgtactcaccggcggcggcgagatgtacaaggtctatacgccgtttcgcaacgtctttcttcaacgcctgaccgagtccgacgtgagctgcctgccggcgccgaagactcgcgccggtggtgcgttacctatgcctgaagcgccggcggcgttcgattaccctacggcggagactggggatggctatcccgncggcgaggaggccgcgttgcagcggctgcgcgccttttgccgcgagcaggtgcaggattacctccggcagcgcgatctgccggccctcgccggcaccagtagcctgtcgccctatctggcgatcggcacgctgtcgccgcgccagtgcttcaaccgcctgcgcgccgaatgcccgcagctgctggaagatcgcgaaagcggcgccttcgcctggctaaacgagctgatttggcgcgagttctatcgccatctgctggtggcctatcccgatctgtgccgccatcggccgtttattgcctggacggacaaggtgcgctggtgcgatgacgcggcgaagctgcacgcctggcagcggggcgaaacaggctacccgatcgtcgatgccgccatgcgccagctgaacgccaccggctggatgcacaaccggctgcgcatgatcagcgccagttttctggtgaaggatctgttgatcgactggcgcgccggggagcgctatttcatgtcgcaactgctggatggggatctggcggccaataacggcggctggcagtgggcggcatccaccggcaccgacgccgcgccgtatttccgcatcttcaacccgacgactcagggtgaacgttttgatccacaaggcacttttatccgtaaatggttgccggaactggcggatgtgcccgacaatgacatccatcatccccatcgctgggcggaaaagcagcgatgcacgctgaactacccgctgccgatcgtcgatcataagcaagcccggctggagacgctggcggcgttcgaggcggcaaaacggggagagtcttga

SEQ ID NO: 7098 - protein, 476 aa, Enterobacter cloacae
  misc_feature (204)..(204): Xaa can be any naturally occurring amino acid
MTTHLVWLRNDLRITDNKALHAACSDPEARVLAVFIATPQQWRQHEMAPRQAALIHASLQAVQQALAHKGIALHCHSCADFAASIDWLADYCEREQVDALFYNRQYELNERRRDARLEQRLSGRVRCHGFDDSLLLPPGSVLTGGGEMYKVYTPFRNVFLQRLTESDVSCLPAPKTRAGGALPMPEAPAAFDYPTAETGDGYPXGEEAALQRLRAFCREQVQDYLRQRDLPALAGTSSLSPYLAIGTLSPRQCFNRLRAECPQLLEDRESGAFAWLNELIWREFYRHLLVAYPDLCRHRPFIAWTDKVRWCDDAAKLHAWQRGETGYPIVDAAMRQLNATGWMHNRLRMISASFLVKDLLIDWRAGERYFMSQLLDGDLAANNGGWQWAASTGTDAAPYFRIFNPTTQGERFDPQGTFIRKWLPELADVPDNDIHHPHRWAEKQRCTLNYPLPIVDHKQARLETLAAFEAAKRGES

SEQ ID NO: 7099 - DNA, 774 bp, Enterobacter cloacae
  misc_feature (583)..(583): n is a, c, g or t
atgaacttcgccatgaaattacattatcaactgctggccgccgagtcagacgcgctgcctgtgctgctgatccacgggctgttcggcaatctggacaacctgggcgtgctggcgcgcgatctgcataaacagcacacggtgatcaaggtcgatctgcgcaatcacggcctctccccgcgcgccgacgacatgaactatcccgccatggcacaggatctgctggcgctgctcgacgaactgcagctggagaaagcgatcgtcatcggccattcgatgggcggcaaagcggcgatggcgctgaccgccatcgcgcccgagcgtgtcgccaagctgatcgttatcgacgtcgcgccggtggattaccagacccgccgtcacgacgagattttcgccgcgctgaaggccgtcagcgccgccggcatcacccagcgccaggcggccgccgagctgatgcgcgactacctgcaggaagaaggcgtgatccagttcctgctgaagtccttccacaacggcgaatggcgcttcaacctgccggtgctgatcgcacgctacgaagacatcaccggctggcaggaagtcccgncctggccgcacccgaccctgttcattcgcggcggcctgtcgccgtacgtgcaggacagttaccgtgcggacatcgcccgccagttcccgcaggcccgcgcgcacgtcgtcgccggtaccggccattgggtgcacgccgaaaaaccggaagcggtgctgcgcgccatccaccgtttcctcggcgaagcctga

SEQ ID NO: 7100 - protein, 257 aa, Enterobacter cloacae
  misc_feature (195)..(195): Xaa can be any naturally occurring amino acid
MNFAMKLHYQLLAAESDALPVLLIHGLFGNLDNLGVLARDLHKQHTVIKVDLRNHGLSPRADDMNYPAMAQDLLALLDELQLEKAIVIGHSMGGKAAMALTAIAPERVAKLIVIDVAPVDYQTRRHDEIFAALKAVSAAGITQRQAAAELMRDYLQEEGVIQFLLKSFHNGEWRFNLPVLIARYEDITGWQEVPXWPHPTLFIRGGLSPYVQDSYRADIARQFPQARAHVVAGTGHWVHAEKPEAVLRAIHRFLGEA

SEQ ID NO: 7101 - DNA, 1215 bp, Enterobacter cloacae
  misc_feature (511)..(511): n is a, c, g or t
atggcgagcattcacacagaaaacatagccaatatgaagacatctcaaaatcggtatgacgcggtggtggtcggcggcggcatggtcggcgcggcggcggccctggggctagcgcaggcgggctggtcggtggcgttgctggaacatcaggcgccgcaggcgttcgaggcgcaaagcccgccggatctgcgcatttccgctatcggctgcacctcggtggggctgctgaaacagctcggcgcctggcaggccgtgacggcgatgcgcacggcgccgtatcgccggctggagacctgggagtgggcgtcgtcgcgcgtggcgttcgacgcggtgtccctggggctgccggagctgggctttatggtggaaaaccgcattctgcagctggcgctgtggcagcagttcgcacagtgcgccaatttgacgctgctgtgccccgccaggctgcaatcgctgcagcgggcggacaatgcctggcagctgacgctggacggcggtgagacgctgcagncgcgtttggttgtcggcgccgacggcgccaactcgcaggtgcgcaagctggcggcgatcggcaccaacggctggcagtatcgtcaggcgtgcatgttgatcaccgtcgataccggtgcgccgcagcaggatgtgacctggcagcgcttcttcccatccgggccgcgtgccttcctgccgctgtacgacagctgggcgtcactggtgtggtatgacagcccgcagcgcattcgccagctgcaggcgatgccgccggcgcaactggagcgcgagatcgccgccgctttcccggcgcgactgggcccggttaaggtgcacgctgccggttcgttcccgctgacgcggcgtcatgcgcagcgctacgtgttgccggggctggcgctgttgggtgatgcggcgcataccatcaatccgctggccgggcagggcgtcaatctggggtatcgcgacgtggatgccttgctgaacgtattaagcgatgcgcgggagcagggagaggactggagcagcgaggcggtactgctgcgctatcagcgccgccgccgtaccgacaatctgctgatgcagagcggcatggatctgttctataccgctttcagcaataacctggcgccgctgaacgtggcgcgcaatctggcgctgatggccgcgcagcgggcgggcaagctgaaagagcatgcgttgaagtacgcgttgggattgtaa

SEQ ID NO: 7102 - protein, 404 aa, Enterobacter cloacae
  misc_feature (171)..(171): Xaa can be any naturally occurring amino acid
MASIHTENIANMKTSQNRYDAVVVGGGMVGAAAALGLAQAGWSVALLEHQAPQAFEAQSPPDLRISAIGCTSVGLLKQLGAWQAVTAMRTAPYRRLETWEWASSRVAFDAVSLGLPELGFMVENRILQLALWQQFAQCANLTLLCPARLQSLQRADNAWQLTLDGGETLQXRLVVGADGANSQVRKLAAIGTNGWQYRQACMLITVDTGAPQQDVTWQRFFPSGPRAFLPLYDSWASLVWYDSPQRIRQLQAMPPAQLEREIAAAFPARLGPVKVHAAGSFPLTRRHAQRYVLPGLALLGDAAHTINPLAGQGVNLGYRDVDALLNVLSDAREQGEDWSSEAVLLRYQRRRRTDNLLMQSGMDLFYTAFSNNLAPLNVARNLALMAAQRAGKLKEHALKYALGL

SEQ ID NO: 7103 - DNA, 1653 bp, Serratia marcescens
  misc_feature (1460)..(1460): n is a, c, g or t
atgcgtttttcgctgaaaaccaccgcatgtgcgttggccgtttccctgacgttgctgtcgggggccgccagtgcctgggaaaaggataagacctacgccatcaccattctgcataccaacgaccatcacggtcacttctggcagaacgatcatggcgaatacggcctgggcgcgcagaaaacgttggtggacggcattcgtcaggaagtggcggcgcagggcggcagcctgctgttgctgtccggcggcgatatcaacaccggcgtgccggaatcggatttgcaggacgccgagccggacttccgcggcatgaacctggtgggttacgacgcgatggcgatcggcaaccacgaattcgacaacccgctgagcgtgctgcggcagcaggaaaaatgggcgaccttcccgctgctgtccgccaatatctatcagaaaagcaccggccagcgcctgttcaagccttacgccttgttcgacaagcagggcatcaagattgccgtgatcggcctgacgaccgacgacactgccaagataggcaacccggagtacttcaccgacatggagttccgcgtgccggcgcaggaggcgaagcaggtggtggagcaactgcgtaaggacgagaagccggacgtgattatcgccgccacccatatggggcactacgacaatggtgaacacggctcgaacgcgccgggcgacgtggaaatggcgcgcagcctgccggccgggtatctcgacatgattgtcggcggccactcgcaggatccggtgtgcatggccggcgacaaccgcaaacaggcagattacgtgccgggcacgccgtgctcgccggatcgccagaacggcacctggatcgtgcaggcgcacgagtggggcaaatacgtgggccgcgccgacttcgaattccgcaacggcgagctgaagctggtgcattatcagctgatcccggtgaacctgaagaagaaggtggagaaggcggacggcaccagcgagcgggtgtactacacccagcagatcgcggaagacccgaccatgatgaaactgctgacgccgttccaggagaagggcaaggcgcagttgggcgtgaagatcggcagcgttaacggcaagctggagggcgatcgcagcaaggtgcgcttcgtgcagaccaacctggcgcgggtgatgctggcggcgcagagggagcgcgccgatgccgacttcgcggtgatgagcggcggcggggtgcgcgattcgattgaaagcggcgatatcacctataagaacgtgctcaaggtacagccgttcggcaacaccctggtgcatgtcgatatgaaaggcagcgaggttgagcagtacctggcggtggtggccaacatgaagccggattccggcgcctacgcccagttcgccaacgtcagcctggtggcggacggcaagggcgtcagcgaggtgaagatcaacggccagccgctgcaggnggataaaacctaccgcatggcgacgctgaacttcaacgcgctgggcggcgacggctatccgaagctggacgggctgccgagctacgtcaacaccggctttatcgacgccgaggtgctgaagcaatacatcgagaaacattcaccgctggatgcggcggcctacgagccgaagggcgagatcgtctatcgataa

SEQ ID NO: 7104 - protein, 550 aa, Serratia marcescens
  misc_feature (487)..(487): Xaa can be any naturally occurring amino acid
MRFSLKTTACALAVSLTLLSGAASAWEKDKTYAITILHTNDHHGHFWQNDHGEYGLGAQKTLVDGIRQEVAAQGGSLLLLSGGDINTGVPESDLQDAEPDFRGMNLVGYDAMAIGNHEFDNPLSVLRQQEKWATFPLLSANIYQKSTGQRLFKPYALFDKQGIKIAVIGLTTDDTAKIGNPEYFTDMEFRVPAQEAKQVVEQLRKDEKPDVIIAATHMGHYDNGEHGSNAPGDVEMARSLPAGYLDMIVGGHSQDPVCMAGDNRKQADYVPGTPCSPDRQNGTWIVQAHEWGKYVGRADFEFRNGELKLVHYQLIPVNLKKKVEKADGTSERVYYTQQIAEDPTMMKLLTPFQEKGKAQLGVKIGSVNGKLEGDRSKVRFVQTNLARVMLAAQRERADADFAVMSGGGVRDSIESGDITYKNVLKVQPFGNTLVHVDMKGSEVEQYLAVVANMKPDSGAYAQFANVSLVADGKGVSEVKINGQPLQXDKTYRMATLNFNALGGDGYPKLDGLPSYVNTGFIDAEVLKQYIEKHSPLDAAAYEPKGEIVYR

SEQ ID NO: 7105 - DNA, 2700 bp, Serratia marcescens
  misc_feature (154)..(154): n is a, c, g or t
atgtttattcacaagggaaccacgccggccggccgattggccacggcggtacgtgccgcgctggcggcgatgatgttgactcagccggctgtggcgctcgctgcccaggctgaggcgaacggcgcgcaggctgcacagcaaaagcatttcaacnttgcggcgcagccgctgcagagcgccatgttgcgcttcgccgagcaggccggcatgcaggtatttttcgacgaggtgaagctcgacggcatgcaggcggcggcgctgaacggcagcatgagcgttgaagagggcctgcggcgcttgatcggcggcaatccggtggctttccgcctgcagccgcaggggcagatcgtattgagccggctgccgacggcgaacggcaacggcggcgcgctggcgctggacagcctgacggtgctgggcgccggcggcatcaacgccaacgattgggtttacgacgaaccgcgctcggtcagcgtcatcagccgcgaacagatggacaaccgcccggcgcgacacgcggccgatattctggagcagacgacgggggcctattccagcgtcagccagcaagatccggcgctgtcggtcaacatccgcggcatacaagactacggccgggtgaacatgaacatcgacggcatgcggcagaattttcaaaagagcggccatggccagcgtaacggcaccatgtacatcgattccgaactgctgtccggcgtaaccatcgacaagggcaccaccggcggtatgggcagcgccggcacgctcggcggcatcgccaccttcaataccgtcagcgcgagcgatttcctggcgccgggcaaagagctgggcggcaagctgcacgccagcaccggcgataacggcacccacttcatcggcagcggcatactggcattgggtaacgaaaccggcgatatgctgctggccgccagcgaacgccacctcggcgactattggcccggcaacaagggcgacatcggcaacattcgcatcaataacgacaccggcaattacgatcgctacgccgagagcatcaagaacaacaaaatccccgacactaattaccgcatgcactcgcggctggccaaggtgggctggaacctgcccgccaaccagcgcctgcagctgagctatctgcagacccagaccgcgtcgccgatcgccggcaccttgaccaacctgggcacccggccgccttatgaactgggctggaagcgcaccggttacagcgacgtgatggcgcgcaacgcggcgttcgactacagcctggcaccggaaggcgtcgactggctcgattttcaggccaagctgtattacgtcgatactcaggacgacagcgacacctacagcaccagctcgctgctggacaacggctacgcgacgcgcacccgcctgcgtacctatggcgcgcaggcgcaaaacacctcgcgcttcagcctggcgccggggcatgacttccgcgccaactacgggctggagttctattacgacaaagcgaccagcgactcttcccgtgagggtatggaaggggtgacgccggccggcaaccgttcggtcggcagcctgttcgccaacctgacctacgactacgacggctggctgacgctggagggcgggctgcgttacgaccgctatcgcctgcgcggccagaccggcctgagctatccggatttggccaaggatgggcaacgctacacgattgacaatccttgcaaagcgttgcgtctgaccggctgttcaaccacgacccgcgaagattgggacgtggatcgcgatcagggcaagctgtcgccgacgctggcggtggcggtgcgccccggcgtggagtggcttgagctgtataccacctacggcaaatcctggcggccgccggcgatcaccgaaacgctgaccaacggcagcgcgcacagcacctcgacgcaataccctaacccgttcctgcaggccgagcgctcgcgcgcctgggaagtcgggttcaacgtgcagcagccggatctgtggtttgagggcgatcggttggtggccaaggtggcctacttcgacaccaaagtggataactacatcaacctggcgatagaccgcaataaaccggggctggtgcagccgagcatcggcaatgccgcttacgtcaacaacctgtctaaaacccgcttccgcgggctggagtaccagctcaactatgacgccggggtgttctacgccgacctgacctacacccacatgatcggtaaaaacgagttctgctcgaacaaggcctggttgggagggcgtctgcgctacggcgacggatcgcgtcgcggcaacttctatgttgagccggatgccgcttccaatgacttcgtcacgtgtgacggggggacgcagttcggctccgccgcctacctgccgggcgatcgcggctcggtgacgctgggcggccgcgccttcgatcgcaagctggacgccggggtgaccgtgcgcttcgcgccgggctatcaggacagctcggtgccatccaactacccgtacctggccgactggccgaagtacaccctgttcgatctgtacgccagctacaagctgaccgacagcctgacgctgcgcggctcggtggagaacctgaccaaccgcgcctacgtcgtcagctatggggagacgctggccaataccctggggcgcggccgcaccgtgcagggcggggtggaataccgtttttaa

SEQ ID NO: 7106 - protein, 899 aa, Serratia marcescens
  misc_feature (52)..(52): Xaa can be any naturally occurring amino acid
MFIHKGTTPAGRLATAVRAALAAMMLTQPAVALAAQAEANGAQAAQQKHFNXAAQPLQSAMLRFAEQAGMQVFFDEVKLDGMQAAALNGSMSVEEGLRRLIGGNPVAFRLQPQGQIVLSRLPTANGNGGALALDSLTVLGAGGINANDWVYDEPRSVSVISREQMDNRPARHAADILEQTTGAYSSVSQQDPALSVNIRGIQDYGRVNMNIDGMRQNFQKSGHGQRNGTMYIDSELLSGVTIDKGTTGGMGSAGTLGGIATFNTVSASDFLAPGKELGGKLHASTGDNGTHFIGSGILALGNETGDMLLAASERHLGDYWPGNKGDIGNIRINNDTGNYDRYAESIKNNKIPDTNYRMHSRLAKVGWNLPANQRLQLSYLQTQTASPIAGTLTNLGTRPPYELGWKRTGYSDVMARNAAFDYSLAPEGVDWLDFQAKLYYVDTQDDSDTYSTSSLLDNGYATRTRLRTYGAQAQNTSRFSLAPGHDFRANYGLEFYYDKATSDSSREGMEGVTPAGNRSVGSLFANLTYDYDGWLTLEGGLRYDRYRLRGQTGLSYPDLAKDGQRYTIDNPCKALRLTGCSTTTREDWDVDRDQGKLSPTLAVAVRPGVEWLELYTTYGKSWRPPAITETLTNGSAHSTSTQYPNPFLQAERSRAWEVGFNVQQPDLWFEGDRLVAKVAYFDTKVDNYINLAIDRNKPGLVQPSIGNAAYVNNLSKTRFRGLEYQLNYDAGVFYADLTYTHMIGKNEFCSNKAWLGGRLRYGDGSRRGNFYVEPDAASNDFVTCDGGTQFGSAAYLPGDRGSVTLGGRAFDRKLDAGVTVRFAPGYQDSSVPSNYPYLADWPKYTLFDLYASYKLTDSLTLRGSVENLTNRAYVVSYGETLANTLGRGRTVQGGVEYRF

SEQ ID NO: 7107 - DNA, 582 bp, Serratia odorifera
  misc_feature (65)..(65): n is a, c, g or t
atgtaccacgaccttattcgcagtgaactgaacgaagcggctgataccctggcgaaatttatcantgacgacgccaatatcgacgccatccaacgcgccgcggtgctgctggcggattccttcaaagccggcggtaaagtgatttcctgcggcaacggcggttcccattgcgacgcgatgcacttcgccgaagagctgaccggccgctaccgtgaaaaccgcccgggctacccggcgattgccatctcggacgtgagccacctgtcctgcgtcagcaacgacttcggctatgagtacgtgttctctcgctatgtggaagcggtaggccgcgaaggcgacgtgctgctgggcatttccacctccggcaattccggcaacatcatcaaggccatcgacgcggcgcgcgccaaggggatgaaagtgatcaccctgaccggcaaggacggcggcaagatggcgggttccgccgatgtggaaattcgcgtgccgcacttcggctacgccgaccgcattcaggaaatccacattaaagcgattcacatcttgattcagctgatcgaaaaagagatggttaaggcttga

SEQ ID NO: 7108 - protein, 193 aa, Serratia odorifera
  misc_feature (22)..(22): Xaa can be any naturally occurring amino acid
MYHDLIRSELNEAADTLAKFIXDDANIDAIQRAAVLLADSFKAGGKVISCGNGGSHCDAMHFAEELTGRYRENRPGYPAIAISDVSHLSCVSNDFGYEYVFSRYVEAVGREGDVLLGISTSGNSGNIIKAIDAARAKGMKVITLTGKDGGKMAGSADVEIRVPHFGYADRIQEIHIKAIHILIQLIEKEMVKA

SEQ ID NO: 7109 - DNA, 864 bp, Enterobacter cloacae
  misc_feature (460)..(460): n is a, c, g or t
atgaacaaccaaccgcttaattgccatattcaaccgaataccccgtttggcgcgatcctgacgccgcagcatccggggcaaaagatcggcgagctgccggtggcggcgctgcgggcgctggcgcaggaacaccacttgctggtgctgcgcggattcgactcgggtttcagcgaggcggaagttctgactcgctacgctgagcagtggggcgagatcatgatgtggccgttcggcgcggtgctggacgtgaaggagcatccggacgccaaggatcatatcttcgacagcagctacgtcccgctgcactgggatggcatgtataagccgaccatccccgagttccagctgttccactgcgtggcggcgccgtcgccggacgaaggcggatgcaccaccttcgtcgacaccacgcggctgttggccaatgcggacgaagcgctgctggatcagtggctgtcgntctcgatcacctaccgcatcaagcaagtggtgcattacggcggcgaagtctgttcgccgctggtggtgcagcacccgaacggcaggggcttaatcatgcgctacaatgaaccgccgacggaaggaaaaaaattcctcaatcaacatgcgctggaataccacggcgtgccggaacaccagcaggaacagttccaccacactctgcagcagcacctgtacgatccgcgtcactattatgcccaccaatggcaacagggcgacgtggtggtggcggacaacttctcgctgctgcatggccgtgagggctttaccgcccgttccgcgcgtcatttgcagcgcgtgcatattcagagcaacccggtgtgtgccaatctggcgctgaagccggccaacgcagaagcgtaa

SEQ ID NO: 7110 - protein, 287 aa, Enterobacter cloacae
  misc_feature (154)..(154): Xaa can be any naturally occurring amino acid
MNNQPLNCHIQPNTPFGAILTPQHPGQKIGELPVAALRALAQEHHLLVLRGFDSGFSEAEVLTRYAEQWGEIMMWPFGAVLDVKEHPDAKDHIFDSSYVPLHWDGMYKPTIPEFQLFHCVAAPSPDEGGCTTFVDTTRLLANADEALLDQWLSXSITYRIKQVVHYGGEVCSPLVVQHPNGRGLIMRYNEPPTEGKKFLNQHALEYHGVPEHQQEQFHHTLQQHLYDPRHYYAHQWQQGDVVVADNFSLLHGREGFTARSARHLQRVHIQSNPVCANLALKPANAEA

SEQ ID NO: 7111 - DNA, 1149 bp, Serratia marcescens
  misc_feature (412)..(412): n is a, c, g or t
ttgataaagtcagcgctattggttctggaagacggaacccaattccacggtcgggccatcggggcagagggaacggcagtgggggaagtggtcttcaatacgtcgatgaccggttatcaagaaatcctcactgatccttcctattcccgccagatcgttactcttacttatcctcatatcggcaatgtcggcaccaatgcttccgacgaagaatcctccgcagtacacgcccaaggcctcgtcattcgtgacctcccgctgatcgccagcaactaccgcaacgaagaaagcctgtccgactacctcaagcgtcacaacatcgtggcgatcgccgatatcgatacccgtaaattaacccgcctgctgcgcgagaagggcgcccagaacggctgcatcatcgccgccgactcgncggacgccgcgctggccctggccaaggcgcaaggtttcccggggttgaagggcatggatctggcgaaagaggtcaccacccaagaggcttacagctggcagcaaggcagctggacgcttgaaggcgacctgcccgaagccaaaaccgccgcggagttgccgttccacgtggtggcttacgactacggcgccaagcgcaacatcctgcgcatgctggtggatcgcggctgccgcctgaccgtggtgccggcgcagaccccggccgacgacgtgctgaaaatgaatccggacggcatcttcctgtccaacggcccgggcgacccggagccgtgcgactacgccatcgccgccatcaaacagttcctggaaaccgacatcccggtgttcggcatctgcctgggccaccagctgctggcgctggccagcggggcgaaaaccatgaagatgaagctcggccaccacggcggcaaccacccggtgaaggatctggacaacaacaccgtgatgatcaccgcgcagaaccacggcttcgccgtcgatgaaaacaacctgccggcgaacctgcgcgtcacgcacaaatcgctgttcgaccacacggtgcagggcattcaccgcaccgacaaggcggcgttcagcttccagggtcacccggaagccagcccaggcccgcacgatgccgcgccgctgttcgatcactttatcgaactgattgagacttaccgttctaacgccaaataa

SEQ ID NO: 7112 - protein, 382 aa, Serratia marcescens
  misc_feature (138)..(138): Xaa can be any naturally occurring amino acid
MIKSALLVLEDGTQFHGRAIGAEGTAVGEVVFNTSMTGYQEILTDPSYSRQIVTLTYPHIGNVGTNASDEESSAVHAQGLVIRDLPLIASNYRNEESLSDYLKRHNIVAIADIDTRKLTRLLREKGAQNGCIIAADSXDAALALAKAQGFPGLKGMDLAKEVTTQEAYSWQQGSWTLEGDLPEAKTAAELPFHVVAYDYGAKRNILRMLVDRGCRLTVVPAQTPADDVLKMNPDGIFLSNGPGDPEPCDYAIAAIKQFLETDIPVFGICLGHQLLALASGAKTMKMKLGHHGGNHPVKDLDNNTVMITAQNHGFAVDENNLPANLRVTHKSLFDHTVQGIHRTDKAAFSFQGHPEASPGPHDAAPLFDHFIELIETYRSNAK

SEQ ID NO: 7113 - DNA, 2727 bp, Serratia fonticola
  misc_feature (1310)..(1310): n is a, c, g or t
atgaccaaatacagcctgcgtgcgcgcatgatgatcctgattctggccccgaccttgctgattggtttgctgctcagcaccttcttcgtggtgcaccgctataacgagctgcaggagcaactggtcgacgccggcgccagcatcatcgagccgctggcggtggccagcgagtacggcatgacgttccgcagccgcgaatcggtcaggcagttggtcagtctgttgcaccgccgccattcggacatcgtgcgttcgatcaccgtgttcgatgcgcagaacaatttgttcgtcacctccaattatcaccacaacttcgctcagctgcagctgccgaaaggcgtgccgttgcctaccgagctgatgctcacccgacgcggcgattcgctgatcctgcgcacgccgatcctgtcggaaagccagtatccggatgaaaccgccgacggcggcagccaccccgacaacaacctgggctatgtggcgatcgagctggatctgcagtcggtgcggctgcagcaatataaagaggtgttcgtctccaccctgctgctgttgctgtgcatgtgcatcgccatcctgttcgcttaccggctgatgcgcgacgtgaccggcccgatccgcaatatggtgaataccgtcgaccgtatccgccgcggccagctcgacagccgcgtggagggctacatgctcggcgagctgcacatgctgaagaacggcatcaactcgatggcgatgtcgctcaccgcctatcacgaagagatgcagcagaacatcgatcaggccacctccgacctgcgtgaaacgctggagcaaatggaaattcagaacgtcgagctggatctggcgaaaaaacgcgcgcaggaagcggcgcgcatcaagtccgaattcctggccaacatgtcgcacgagctgcgcaccccgctcaacggcgtaatcggcttcacccgccagatgctgaaaaccgatttgagcgcgacccagaccgactatttgcagaccatcgaacgctcggccaacaacctgctgaccatcatcaacgacgtgctggacttctccaagctggaggccggcaagctggtgctggagcatattccgttcgccctgcgtgaaacgctggacgaagtggtggtgctgctggcgcccagcgcccacgataaggggctggagctgacgctggatgtgcacaacgacgtgccggagcaggtgatcggcgactcgctgcgcctgcagcaaatcatcaccaacctgctgggcaacgccatcaagttcaccgaaaccggcaatatcgatattcgcgtcgagctgcgcaaacngctggatcgccgggtggaagtggaagtgcagatccacgacaccggcatcggcatctccgaacgccagcagtcgcagctgttccaggcgtttcgtcaggcggacgccagcatctcccgccgccacggcggcaccgggctggggctggtgatcacgcaaaaactggtgaaagagatggggggcgatatctgcttccacagccagttgaaccgcggctcgaccttctggttccacatcacgctggatctgaacgagggcatgctgtcgctggcgccgagcctgccggatctgaacggcaaaacgctggcctatatcgagtccaacccgacggcggcgcaggcgacgctcaacatgctcagcgtcacgcagctggtgatcacccactcgccgacgctggcccagctgccgccaggccactatgacttcctgctggccggcgtgcccatcccgttccgcgccaatatggcgcagcacgaggacaaattgctggcctcgctgaagctggccgatcgggtgattctggcgctgccgtgccaggcgcagatcgacgccgagctgctcaagcaacaaggcgcgctcggctgcctgatcaagccgatcaccagcacccggttgttcccgctgctcaggatggagacaccgacacgcctcaccgcgccgcctgagcgtaaacgcctgccgctgacggtgatggcggttgacgacaacccggccaacctgaagctgatcggcacgctgctgggggaacaggtagaaaaaaccctgctgtgcgagagcggcgaggaagcgctggcgctggcgcgcgacaacgtgctggatctgatcctgatggacattcagatgccgaagatggacggcattcacgccagcgagctgatccgccaactgccgcatcacaactccacgccgatcgtcgccgttaccgcccatgccgccagcggcgagcgcgagcacctgctgcaggccgggatggacgactatctggccaagccgatcgacgagaaaatgctgacccgcgtgctgtcgcgctaccacagcggcgacgtggaaaacgccgtcgccgacgacgcgccgctgtcgctcgactggccgctggcgctgcgtcaggcggccaataaaccggatctggcgcgcgatctgctgcaaatgctgctcgatttcctgccgcaggtgcgcgagcgggtgcaagcgctgctcgacggccagcatgacgacgagatcctcgatctggtccataagctgcacggcagctgcagctacagcggcgtgccgcgcctcaagcagctgtgtttctacctcgagcggcagctgcgccagggcgtcaccaacgacgagctggagccggagtggctggagctgttggatgagattgaactggtgatccacgcggcgcgcgcgcatctgacgcaaccggcctga

SEQ ID NO: 7114 - protein, 908 aa, Serratia fonticola
  misc_feature (437)..(437): Xaa can be any naturally occurring amino acid
MTKYSLRARMMILILAPTLLIGLLLSTFFVVHRYNELQEQLVDAGASIIEPLAVASEYGMTFRSRESVRQLVSLLHRRHSDIVRSITVFDAQNNLFVTSNYHHNFAQLQLPKGVPLPTELMLTRRGDSLILRTPILSESQYPDETADGGSHPDNNLGYVAIELDLQSVRLQQYKEVFVSTLLLLLCMCIAILFAYRLMRDVTGPIRNMVNTVDRIRRGQLDSRVEGYMLGELHMLKNGINSMAMSLTAYHEEMQQNIDQATSDLRETLEQMEIQNVELDLAKKRAQEAARIKSEFLANMSHELRTPLNGVIGFTRQMLKTDLSATQTDYLQTIERSANNLLTIINDVLDFSKLEAGKLVLEHIPFALRETLDEVVVLLAPSAHDKGLELTLDVHNDVPEQVIGDSLRLQQIITNLLGNAIKFTETGNIDIRVELRKXLDRRVEVEVQIHDTGIGISERQQSQLFQAFRQADASISRRHGGTGLGLVITQKLVKEMGGDICFHSQLNRGSTFWFHITLDLNEGMLSLAPSLPDLNGKTLAYIESNPTAAQATLNMLSVTQLVITHSPTLAQLPPGHYDFLLAGVPIPFRANMAQHEDKLLASLKLADRVILALPCQAQIDAELLKQQGALGCLIKPITSTRLFPLLRMETPTRLTAPPERKRLPLTVMAVDDNPANLKLIGTLLGEQVEKTLLCESGEEALALARDNVLDLILMDIQMPKMDGIHASELIRQLPHHNSTPIVAVTAHAASGEREHLLQAGMDDYLAKPIDEKMLTRVLSRYHSGDVENAVADDAPLSLDWPLALRQAANKPDLARDLLQMLLDFLPQVRERVQALLDGQHDDEILDLVHKLHGSCSYSGVPRLKQLCFYLERQLRQGVTNDELEPEWLELLDEIELVIHAARAHLTQPA

SEQ ID NO: 7115 - DNA, 2643 bp, Serratia marcescens
  misc_feature (248)..(248): n is a, c, g or t
atgagcgaccttgccagagaaatcacaccggtaaacatcgaagacgagttgaaaaactcgtatctggactatgcgatgtccgttattgtcggacgtgcgctgccagatgttcgtgatggactgaagccggttcaccgccgcgttctgtacgcgatgagcgtattgggtaacgactggaataaaccatacaagaaatcggcccgtgtcgtcggggacgtgatcggtaaatatcacccgcacggtgacancgcggtttacgacactatcgtgcgtatggctcagccgttttcactgcgctacatgctggtggacggtcagggtaacttcggctccgtcgacggcgactccgccgcggcgatgcgttataccgaagtgcgcatgtccaagattgctcacgaactgttggcggatctggaaaaagaaaccgtcgacttcgtgcctaactatgatggcaccgagcagatcccggccgtcatgccgaccaagatcccgaacctgctggtcaacggctcgtcgggcatcgccgtgggcatggccaccaatatcccgccgcataacctggcggaagtcgtcaacggctgcctggcctatatcgacgatgaaaacatcagcatcgaagggctgatggaacacatcccggggccggacttcccgacggcagcgatcatcaatggccgccgcggcattgaagaggcctaccgcaccgggcgtggcaaagtctacctgcgcgcgcgcgcggaagtggaggccgacgccaagaccgggcgcgaaaccatcatcgttcacgagatcccgtatcaggtgaacaaggcgcgtctgatcgagaagatcgccgagctggtgaaagaaaagcgtgtggaaggcatcagcgcgctgcgcgacgagtccgataaagacggcatgcgcatcgtgatcgaagtcaaacgcgacgcggtcggcgaagtggtgctgaacaacctgtatgcgctgacgcaactgcaggtcaccttcggcatcaacatggtcgcgctgcatcagggccagcctaagctgctgaacctgaaagacatcctcgaagccttcgtgcgtcaccgccgcgaagtggttacccgccgcaccatcttcgaactgcgcaaggctcgcgaccgcgcccatatcctggaagcgctggctatcgcgctggccaacatcgatccgatcatcgagctgattcgccgtgcgccgaccccggccgaagcgaaagtcgcgttggtggcgcagccgtgggatctgggcaacgtcagcgccatgctggagcgcgccggtgacgacgccgcccgccctgagtggctggagccggagttcggcatccgcgacggcaaatactacctgaccgagcaacaggctcaggcgattctggatctgcgcctgcagaaactgaccggcctggagcacgagaagctgctggacgaatataaagaactgctcaactttatcgccgagctgatctttattctggaaagcccagagcgcctgatggaagtgatccgcgaagagctggtggcagtcaaagagctgtacaacgacggccgccgcaccgagatcaccgccaatacttccgacatcaacatcgaagacctgatcaaccaggaagacgtggtggtgaccctgtctcatcagggctacgtgaagtatcagccgctgtccgactatgaagctcaacgccgcggcggcaaaggcaaatctgcggcgcgtattaaagaagaagactttatcgatcgcctgctggtggccaacacccacgatacgatcctgtgcttctccagccgtggccgcctgtactggatgaaggtgtaccaactgcctgaagccagccgtggcgcgcgcggtcgcccaatcgtcaacctgctgccgctggaagccgatgagcgtatcaccgccatcctgccggtgcgcgagtatgaagaagggcgccacgtgttcatggccaccgccagcggtaccgtgaagaaaaccgcgctgaccgagttcagccgcccacgcagcgccggcatcatcgccgtcaacctcaacgagggcgacgagctgatcggtgtcgatctgaccgacggcagcaacgaagtgatgttgttctccgccaacggtaaagtggtacgcttcccggaaacgcaggtgcgttcgatgggccgcaccgcaaccggcgtgcgcggcatcaacctcggcgaaggcgacagcgtgatctccctgatcgtgccgcgcggcgaaggcgacatcctgaccgtgacgcaaaacggcttcggtaaacgcaccgccgtgaccgaatatccgaccaagtcacgcgccacccagggggttatctccatcaaggtgagcgagcgtaacggccaggtggtcggcgccgtacaggtggaaaccagcgaccagatcatgatgatcaccgatgccggcacgctggtgcgtacccgcgtttcggaagtcagcgtggtgggccgtaacacccagggcgtgacgctgattcgcacggcggaagacgaaaacgtcgtcggcctgcagcgcgtggccgagccggtggaagacgaagagctggacagcctggaaccgggcgcggaagcggtggaagaagacaccacgccgctggacgatggcgacgacgcggctgagccgatggacgacgacaacgtttaa

SEQ ID NO: 7116 - protein, 880 aa, Serratia marcescens
  misc_feature (83)..(83): Xaa can be any naturally occurring amino acid
MSDLAREITPVNIEDELKNSYLDYAMSVIVGRALPDVRDGLKPVHRRVLYAMSVLGNDWNKPYKKSARVVGDVIGKYHPHGDXAVYDTIVRMAQPFSLRYMLVDGQGNFGSVDGDSAAAMRYTEVRMSKIAHELLADLEKETVDFVPNYDGTEQIPAVMPTKIPNLLVNGSSGIAVGMATNIPPHNLAEVVNGCLAYIDDENISIEGLMEHIPGPDFPTAAIINGRRGIEEAYRTGRGKVYLRARAEVEADAKTGRETIIVHEIPYQVNKARLIEKIAELVKEKRVEGISALRDESDKDGMRIVIEVKRDAVGEVVLNNLYALTQLQVTFGINMVALHQGQPKLLNLKDILEAFVRHRREVVTRRTIFELRKARDRAHILEALAIALANIDPIIELIRRAPTPAEAKVALVAQPWDLGNVSAMLERAGDDAARPEWLEPEFGIRDGKYYLTEQQAQAILDLRLQKLTGLEHEKLLDEYKELLNFIAELIFILESPERLMEVIREELVAVKELYNDGRRTEITANTSDINIEDLINQEDVVVTLSHQGYVKYQPLSDYEAQRRGGKGKSAARIKEEDFIDRLLVANTHDTILCFSSRGRLYWMKVYQLPEASRGARGRPIVNLLPLEADERITAILPVREYEEGRHVFMATASGTVKKTALTEFSRPRSAGIIAVNLNEGDELIGVDLTDGSNEVMLFSANGKVVRFPETQVRSMGRTATGVRGINLGEGDSVISLIVPRGEGDILTVTQNGFGKRTAVTEYPTKSRATQGVISIKVSERNGQVVGAVQVETSDQIMMITDAGTLVRTRVSEVSVVGRNTQGVTLIRTAEDENVVGLQRVAEPVEDEELDSLEPGAEAVEEDTTPLDDGDDAAEPMDDDNV

SEQ ID NO: 7117 - DNA, 153 bp, Serratia marcescens
  misc_feature (77)..(77): n is a, c, g or t
atgcgcttaaggcatgtgcttcactcgctaaccgttgtatgtattacggttttgttatttatctggatgataagagnctcgttgtgcgagctgaaaatctaccaggaaaatatcactatcctgatcaggttggcgtgtgaggtgaagcggtaa

SEQ ID NO: 7118 - protein, 50 aa, Serratia marcescens
  misc_feature (26)..(26): Xaa can be any naturally occurring amino acid
MRLRHVLHSLTVVCITVLLFIWMIRXSLCELKIYQENITILIRLACEVKR

SEQ ID NO: 7119 - DNA, 1467 bp, Enterobacter cloacae
  misc_feature (1201)..(1201): n is a, c, g or t
atgcatatcccgttggatcgcgagcaggacgttccgctctatttacagatcgaagaagcgctgcggcgcgccattctcaccggcgtgtttgtcgatggcgacaaactgccctcgacgcgcacgctggcggccgaactggcggtcagccgtttaacggtggataacgcctacgccgaactggcggccaagggctttttgcatcagcggcgcggcagcggcgcctatgtcgcgcatccgcagatgcaggcacgcccggcccggccgagcagcgatgcccctttcccgctggaaagcttcaccaccctcacctcgcggctggacggctacgccgacgccccgctgccggaggggctgatcaacttcgccgccggcgtcggcagccctaaggtgtttccgctggaggcgtttcgcaaagtgctgctgtcggtgctcagccgccacgcggaagaggccttcagctacggcgaatactgcggctactacccgctgcgcgatacgctgagccgcattctcagcgcgcagggcatccccacgcaggcggaacaggtgctgatcaccaacggctcgcagcacgccatcagcctggtggtgcaaagcctgctggcgccgggcgatacggcgatcgtcgaagagccgacctacgccgaagcgctgggcctgctgcgccagcaccgcgtcaatatcgtcaccgtaccgggcgaccgacacggcatgcgggtggatttgctgccggaattgttagaacgccaccgtcccaaactgatctacaccatccccaatttccacaacccgaccggccgctgcctgagcgaggcgcgtcggcgacgcctgctggcgatcgctcaacaggccggcgtggtgatcctggaagacgacttcgtcggcgatctgcgttatcagggcaaacagctgccgtcgctgcgcgcgctggcgcagccgggcgcggtgatctacgtcagcaccttctccaaaatgctgctgcccagcatgcgcatcggctatctggtggcggacagcgaacactatcagcgcttcgcaaggctgaagcacgtcgacagcttcaccagttccagcctgatccagcgggcgctggacgctttcgtcaccgtcggccgttacgacaagcagctgcggcgcgccgggcgcgtctaccgccgccatctggaggtgatgattgacgccttgcaacggcggctgccgncgggatgccgctttgaaacgccgcagggaggcttgtttatctggctgacgctgccggcgtcggtgaccaccgccgagctgatgccggtcgcctggcgatacggcgtgaccttcgcgcgcggcgaatgcttttatgcgcaggaacatttgggcgcgcacggcctgcggctgaatttcgccgccaactcgccgccgcagattgaagaaggtatcgcccggctatgccgggcgattgaggaggtgataacggagaaaaacgccggttag

SEQ ID NO: 7120 - protein, 488 aa, Enterobacter cloacae
  misc_feature (401)..(401): Xaa can be any naturally occurring amino acid
MHIPLDREQDVPLYLQIEEALRRAILTGVFVDGDKLPSTRTLAAELAVSRLTVDNAYAELAAKGFLHQRRGSGAYVAHPQMQARPARPSSDAPFPLESFTTLTSRLDGYADAPLPEGLINFAAGVGSPKVFPLEAFRKVLLSVLSRHAEEAFSYGEYCGYYPLRDTLSRILSAQGIPTQAEQVLITNGSQHAISLVVQSLLAPGDTAIVEEPTYAEALGLLRQHRVNIVTVPGDRHGMRVDLLPELLERHRPKLIYTIPNFHNPTGRCLSEARRRRLLAIAQQAGVVILEDDFVGDLRYQGKQLPSLRALAQPGAVIYVSTFSKMLLPSMRIGYLVADSEHYQRFARLKHVDSFTSSSLIQRALDAFVTVGRYDKQLRRAGRVYRRHLEVMIDALQRRLPXGCRFETPQGGLFIWLTLPASVTTAELMPVAWRYGVTFARGECFYAQEHLGAHGLRLNFAANSPPQIEEGIARLCRAIEEVITEKNAG

SEQ ID NO: 7121 - DNA, 1710 bp, Serratia fonticola
  misc_feature (418)..(418): n is a, c, g or t
gtgcaccctttttttgaaatgctgttggcggtgtttgatcgcgccgcgctgatgttgatctgtctgtttttcctgacccgcacccggctgttccgccaactgctgcaaaaagaagaccatacgccgctcgagctcggcatcgtcacggcgatcttctcgctgttcgcgctgttcagcacctactccggcatcaacgtcgaagggtcgctggtcaacgtgcgcgtcatcgccatcatggccggcggcatcctgttcggcccctgggtgggcatcgtcaccggcatcgtcgccggggtgcaccgctatctgatcgacatcggcggcatcacctcggtgccttgtcttatcaccagcatcatcgccggcatcagcgccggctacatcaacctcaaggtgaaaaaagagcagcgctggcgcnccggcatcgtcggcggcatgctgtgcgaatccctcaccatgctgctgatcgtgctgtgggccaagccgaccgagcttgggttggacatcgtgtcgcagattgccctgccgatgatcctcggcacggtgtgcatcggcctgatcgtgctgctggtgcagagcgtcgaggatgaaaaagaggtgatcgccgcgcgccaggccaagctggcgctggatatcgcccacaagacgctgccctatttccgcaacatcaacagcgaatcgctggccaccatctgcgatatcatccgccaggacatccgcgccgacgcggtggcgatcaccgatacccaccaggtgctggcctacgtcggcgtagggcgcgaagcctacccgatcggccgcgaagggctgagccgcgtcacccgcgaaagcattcgccacggcaaaatcatcatcaagaacaacctggaaaacccggccgcgccgcagatccattcgcagctggtggtgccgctgtgggaaaaaggcgaagtgaccggcgcgctgaaaatttactactgccacgcccaccagatcaccaacacgctgaaggtaatggcggtcgggctgtcgcagatcatctccacgcagatcgaggtttcccgcatcgagcatctgcgccagatggcggacaaagccgaaatgcgcgcgctgcagagcaagatcaacccgcacttcctgttcaacgcgctgaacgccatctcttcctctatccgcctgaatccggacaccgcgcgccagctgatcatcaatctgtcgcgctacctgcgctacaacctggagctgaacgacgaactgatcgatatccgcaaggagctgcatcagattcaggactatatcgccatcgaacaggcgcgcttcggcgccaagctgacggtgatttacgacatcgacgacgacgtctcggtgcgcattcccagcctgctgatccagccgctggtggaaaacgccatcgtgcacggcatccagccctgcaagggtaaaggggtggtggtgatcgcggtgaaagatcagggcgatcgggtgaagatttcggtgaaggataccggccacggcatcaatcaggaaaccatcgaccgggtggcgcgcaacgagatgccgggccacaatatcggcctgctcaacgtgcaccaccgcgtgtcgctgctgtatggtgaagggctgcatatccgccgcctggagccgggcaccgaaatcgcgttctacatcagcaaaaacggcggcaagctgcatcaggaaccgagcgcgccgccggtcggggaggcctcatga

SEQ ID NO: 7122 - protein, 569 aa, Serratia fonticola
  misc_feature (140)..(140): Xaa can be any naturally occurring amino acid
MHPFFEMLLAVFDRAALMLICLFFLTRTRLFRQLLQKEDHTPLELGIVTAIFSLFALFSTYSGINVEGSLVNVRVIAIMAGGILFGPWVGIVTGIVAGVHRYLIDIGGITSVPCLITSIIAGISAGYINLKVKKEQRWRXGIVGGMLCESLTMLLIVLWAKPTELGLDIVSQIALPMILGTVCIGLIVLLVQSVEDEKEVIAARQAKLALDIAHKTLPYFRNINSESLATICDIIRQDIRADAVAITDTHQVLAYVGVGREAYPIGREGLSRVTRESIRHGKIIIKNNLENPAAPQIHSQLVVPLWEKGEVTGALKIYYCHAHQITNTLKVMAVGLSQIISTQIEVSRIEHLRQMADKAEMRALQSKINPHFLFNALNAISSSIRLNPDTARQLIINLSRYLRYNLELNDELIDIRKELHQIQDYIAIEQARFGAKLTVIYDIDDDVSVRIPSLLIQPLVENAIVHGIQPCKGKGVVVIAVKDQGDRVKISVKDTGHGINQETIDRVARNEMPGHNIGLLNVHHRVSLLYGEGLHIRRLEPGTEIAFYISKNGGKLHQEPSAPPVGEAS

SEQ ID NO: 7123 - DNA, 1416 bp, Serratia fonticola
  misc_feature (1027)..(1027): n is a, c, g or t
atgaaaatcaaaacccgttttgcaccgagcccgaccggctatcttcacgtcggcggcgcgcgtaccgcactttattcctggttgttcagccgccatgcgggcggtgagttcgttctgcgtatcgaagataccgatctggaacgctccacccaggacgcgatcgacgcaattatggatggcatgaactggttgaacctggattgggatgaaggcccgtatttccagaccaagcgtttcgatcgttacaacgcggtcatcgacgagatgctggagcagggcactgcctataaatgctattgctccaaggaacgtctggaagcgctgcgcgagaagcagatggaaaacggcgagaagccgcgctacgacggccactgccgcgacagccagtgcagccacaccgacgacgagccgcacgtggtgcgcttccgcaacccgcaggaaggctcggtgatcttcgacgacaaaattcgcggcccgatcgaattcagcaaccaggagctggacgatctgatcatccgccgtaccgatggttcgccaacctataacttctgcgtcgtcgtcgatgactgggacatggaaatcacccacgtgatccgcggcgaagaccatatcaacaacaccccgcgccagatcaacattctcaaagcgctgggcgcgccggtgccggaatacgcgcacgtgtcgatgatcctcggcgacgatggtaaaaagctgtccaagcgtcacggcgccgtgggcgttatgcagtaccgcgacgacggctatctgccgcaggcgctgctgaactacctggtgcgtctgggctggtcccacggcgatcaggagatcttctccatcgatgagatgaaagagttcttcacgctggaagcgatcaacaaatccgccagcgcgttcaacaccgagaagctgcagtggctgaaccaccactacatcaaccatatgccggcggaagaagtggcggtgcatctggcgtggcacgttgagcaactgggccttgaaacccgcaacggcccggaactgaaagacntcgtcaagctgctgggcgagcgttgcaaaacgctgaaagaaatggcggagtcctgccgctacttctatgaagacttcagcgagttcgatgcagacgcggccaagaagcacctgcgcccggtggcgcgtcagccgctggaggcggtgcgcgccaagctggccgccatcaccgtctggacgccggaaaacgtgcacgacgccattcagggcactgcggatgagctgggtgtcggcatgggtaaagtcggcatgccgctgcgcgttgcggtgaccggcgccggtcagtcgccgggcatggacgtgaccgtgcatgctatcggccagaagcgttcgctgcagcgcatcgacatggcgctggcttacatcgccgagcgcgaagcgcaagcttga

SEQ ID NO: 7124 - protein, 471 aa, Serratia fonticola
  misc_feature (343)..(343): Xaa can be any naturally occurring amino acid
MKIKTRFAPSPTGYLHVGGARTALYSWLFSRHAGGEFVLRIEDTDLERSTQDAIDAIMDGMNWLNLDWDEGPYFQTKRFDRYNAVIDEMLEQGTAYKCYCSKERLEALREKQMENGEKPRYDGHCRDSQCSHTDDEPHVVRFRNPQEGSVIFDDKIRGPIEFSNQELDDLIIRRTDGSPTYNFCVVVDDWDMEITHVIRGEDHINNTPRQINILKALGAPVPEYAHVSMILGDDGKKLSKRHGAVGVMQYRDDGYLPQALLNYLVRLGWSHGDQEIFSIDEMKEFFTLEAINKSASAFNTEKLQWLNHHYINHMPAEEVAVHLAWHVEQLGLETRNGPELKDXVKLLGERCKTLKEMAESCRYFYEDFSEFDADAAKKHLRPVARQPLEAVRAKLAAITVWTPENVHDAIQGTADELGVGMGKVGMPLRVAVTGAGQSPGMDVTVHAIGQKRSLQRIDMALAYIAEREAQA

SEQ ID NO: 7125 - DNA, 1968 bp, Serratia liquefaciens
  misc_feature (1108)..(1108): n is a, c, g or t
atgaacagcccaacctttatccggctgagattcgccttcaagctcagcttcgcgattgtgtttgcgctgttcgtcggcttccatctcaatctggaaaccccgcgctggtcggcgatgactgccgccatcgtcgccgccggcccggcctttgccgccggcggtgaacccttctccggcgccatccgccaccgcggctggctgcgcatcatcggcacctttatcggctgcttcgtcggcctgctcattatcatcaccaccgcccgcgcgccggtggtgatgctgctgttgtgctgcatctgggccggtttctgcacctggctctcttcactgatcaaggtcgagaactcctacgcctggggcctggccggctataccgcgctgatcatcatcgtgacggtcgccaccagcgaggcccatctgctggaagcgccgcagttcgccatcgagcgttgcagcgagatcgtgctgggcatcgtcagcgccgtattggcggatctgctgttctcgccgcgttcgatcaagcaggatatcgatcgggcggtggatcagctgctggtggatcaatatcgcctgatgcagatgtgcatcagcaacgccgacaaagaagacatcgaccgcgcctggagcaatctggtgaagagcaccacggcgctggacggcatgcgcaacaacctgatgatggagtcttcgcgctggcagaaggtcaatcgccgggtgaaggcgctgcataccctgtcgctgacgctgattacccaggcttgcgaaacctacctgatcctgttgaatcacccggacgcgctgcaagcgagcctgcgggaacagctgatggtgccggcggaaaccccgcaggagatccacaggcgcatgaagctgttgcgccaggtgctgaccacgcatcgctccgaagaaacgctgccgaccctcactggctgggtcggcgcggcaacgcgctacctgctgctgtcgaagggcgtacacaccaacggcagcatcagcgcggtggaagaggacgtgttgagcaatgaaacggtggtcaagccgacctcggcggaagggcatcatgcgatgatcaacggcctgcgcacctttgtggccacggcgttcggcngcctgctgtggctgtggaccggctggacgtccggcagcggctttatggtgatcattgcggtaatcacctcgctggcgatgcgcaccccggcgccgcgcatggtggcgatggatttcgtgctgggcatgctggcggcgatcccggtcggctccctgttcttcatggtgatcctgccggcgacacagcagagcattttgctgctgtgcctcagcctcggcctgctggcgtttttcatcggcatcgaggtgcagaagcggcggctcggttcgctggggctgctggcagggaccatcaacattctggtgctgagcaacccgatggagttcaacgtcacccagtttctcgacggagcgctcggccagttcctcggcagctgcgtcgggctgatggtgctgctgttgatccgcgacaattcgcgcgaacgcaccggccgcacgttgctcaaccagttcgtcagcagcgcggtgtcggcgctgaccaccaaggcggcgcgccgtcggcagaaccacctgcctgcgctgtatcagcagcttaatcaactgctgatgatgttcccgaacgacatcgccaagtatcgtctggcgctgaacctgatcatcgcccaccagcgcatgcagcgggcggagattccggtcagcgaagagctgtcggccttccaccgccagatccgcagcaccgccgatcgggtggtctcggccaaaaacgacgtcaagcgcgcctattactacgatcgcttgctgggtgaaatgaacgagtaccagcagaagctggtggacaatcaggcgccgctcagcgtcaccgggccggtgaagcgcctggccgacatgctgcatcgctatcgccacgccttgatcgattga

SEQ ID NO: 7126 - protein, 655 aa, Serratia liquefaciens
  misc_feature (370)..(370): Xaa can be any naturally occurring amino acid
MNSPTFIRLRFAFKLSFAIVFALFVGFHLNLETPRWSAMTAAIVAAGPAFAAGGEPFSGAIRHRGWLRIIGTFIGCFVGLLIIITTARAPVVMLLLCCIWAGFCTWLSSLIKVENSYAWGLAGYTALIIIVTVATSEAHLLEAPQFAIERCSEIVLGIVSAVLADLLFSPRSIKQDIDRAVDQLLVDQYRLMQMCISNADKEDIDRAWSNLVKSTTALDGMRNNLMMESSRWQKVNRRVKALHTLSLTLITQACETYLILLNHPDALQASLREQLMVPAETPQEIHRRMKLLRQVLTTHRSEETLPTLTGWVGAATRYLLLSKGVHTNGSISAVEEDVLSNETVVKPTSAEGHHAMINGLRTFVATAFGXLLWLWTGWTSGSGFMVIIAVITSLAMRTPAPRMVAMDFVLGMLAAIPVGSLFFMVILPATQQSILLLCLSLGLLAFFIGIEVQKRRLGSLGLLAGTINILVLSNPMEFNVTQFLDGALGQFLGSCVGLMVLLLIRDNSRERTGRTLLNQFVSSAVSALTTKAARRRQNHLPALYQQLNQLLMMFPNDIAKYRLALNLIIAHQRMQRAEIPVSEELSAFHRQIRSTADRVVSAKNDVKRAYYYDRLLGEMNEYQQKLVDNQAPLSVTGPVKRLADMLHRYRHALID

SEQ ID NO: 7127 - DNA, 2022 bp, Enterobacter cloacae
  misc_feature (239)..(239): n is a, c, g or t
atgagcaattaccctcacctgctggcgccgctggatctcggcttcactaccctgaaaaaccgggtgctgatgggatcgatgcataccggcctggaagagctgcccgacggcccgcagcgcctggccgcgttctatgccgagcgcgccgccgccggcgtggcgctgatcgtcaccggcggcatcgccccgaacgaacagggcgtggtttttcgcggcggttcgatcctcaacagcgaggngcaattgcctcaccaccgcccggtgaccgaagccgtccaccgggcgggcggcaaaattgcgctgcagatcctgcacaccggccgctacagctatcaacccaagctggtcgccccttccgccctgcaggcgccgatcaacccgtttacgccgagcgcgctcagcgaagcggagatcgagcagaccatcgccgacttcgcccgctgcgcggcgctggcgcagcaggccggctacgacggcgtggaagtgatgggatccgaaggctatctgatcaaccaattcttgacgacgcgcaccaatcagcgcgacgaccaatggggcggcagcttcaccaaccgcatgcgcttcgccgtcgagaccgtcagggcggtgcgccaggcggtgggcgcggagttcattctgatctaccggctgtcgatgctcgatctggtggaagacggctccagctggcaggagatcgagcagctggcgctggcggttgaacaggcgggcgccacgatcatcaataccggcatcggctggcacgaagcgcgtattccgactatcgccaccatggtgccgcgcgccgggttcagttgggtgacccgcaagctgatgggcaaggtcggcatcccgctgatcaccaccaaccgcatcaacgatccggcggtggccgagcaggtgctggcggacggctgcgccgacatggtgtcgatggcgcgtccgttcctcgccgacgccgcctttgtgcagaaagccgccgaggggcgcgccgacgagatcaatacctgcatcggctgcaaccaggcctgtctcgaccagatttttgaaggcaagctgacttcctgcctggtcaacccgcgcgcctgccgcgaaaccgaaatgccgctgacaatggcggagaaaccgaaaaaactggcggtgatcggcgccggccccgccgggctggccttcgccaccaccgccgccagccgaggccatcaggtgacgctgttcgacgccgccgagcagatcggcggccagttcaacatcgccaagcagatccccggcaaggaagaattccatgaaaccctgcgttacttccgccgccagctggcgctgcgcgaagtgacggtcaggctgggcgtcaaggtcgaggcggcagatttaagcgaattcgacgaagtgatcctcgcctgcggcatcgtgccgcgcaccccggacatccccggcatcggccacgccaaggtgctgagctatctggacgtgctgcgcgataaaaaaccggtcggccagcgggtggcgatcgtcggcgccggcggcatcggcttcgacaccgccgagtacctcagccagcacggcgtgtccagcagcctggatcaggcggaattcaaccgcgaatggggcatcgacggccgccttgagcagcgcggcgggctggcggcgcaagggccacaggcaccgcgcgccgcgcggcaaatctacctgttgcagcgcaaaaccagcaaagtgggtgaaggcctggggaaaaccaccggttggatccatcgcgccagcctggcgatgcgcggcgtgaaaatgctcaacagcgtcagctatcggctgatcgacgacgaagggctgcacatcacccgcgccgagcaggacagctgtctgccggtggacacggtggtcatctgcgccgggcaggaaccgcgccgcgagctgcagcagccgctgctggcgatggggaaaaccgtgcatctgatcggcggcgccgacgtggccgccgagctggacgcacgccgcgcgatcgatcaggggacgcggctggcgatggcgctgtaa

SEQ ID NO: 7128 - protein, 673 aa, Enterobacter cloacae
  misc_feature (80)..(80): Xaa can be any naturally occurring amino acid
MSNYPHLLAPLDLGFTTLKNRVLMGSMHTGLEELPDGPQRLAAFYAERAAAGVALIVTGGIAPNEQGVVFRGGSILNSEXQLPHHRPVTEAVHRAGGKIALQILHTGRYSYQPKLVAPSALQAPINPFTPSALSEAEIEQTIADFARCAALAQQAGYDGVEVMGSEGYLINQFLTTRTNQRDDQWGGSFTNRMRFAVETVRAVRQAVGAEFILIYRLSMLDLVEDGSSWQEIEQLALAVEQAGATIINTGIGWHEARIPTIATMVPRAGFSWVTRKLMGKVGIPLITTNRINDPAVAEQVLADGCADMVSMARPFLADAAFVQKAAEGRADEINTCIGCNQACLDQIFEGKLTSCLVNPRACRETEMPLTMAEKPKKLAVIGAGPAGLAFATTAASRGHQVTLFDAAEQIGGQFNIAKQIPGKEEFHETLRYFRRQLALREVTVRLGVKVEAADLSEFDEVILACGIVPRTPDIPGIGHAKVLSYLDVLRDKKPVGQRVAIVGAGGIGFDTAEYLSQHGVSSSLDQAEFNREWGIDGRLEQRGGLAAQGPQAPRAARQIYLLQRKTSKVGEGLGKTTGWIHRASLAMRGVKMLNSVSYRLIDDEGLHITRAEQDSCLPVDTVVICAGQEPRRELQQPLLAMGKTVHLIGGADVAAELDARRAIDQGTRLAMAL

SEQ ID NO: 7129 - DNA, 2274 bp, Serratia marcescens
  misc_feature (262)..(262): n is a, c, g or t
atgagtgatctgactcatgatggtgtagagcgtttaccgctgcacacattcactgaaaacgcctatctgaactattccatgtacgtcatcatggatcgggcgttgccgtacattggcgacggtttgaagccggtacaacgccgcatcatctacgccatgtctgagctggggctgaacaacagcgccaaattcaagaaatccgcccgcaccgtgggcgacgtgctgggtaaataccacccgcatggcgacagcgcgtgttatnaagccatggtgctgatggcgcagccgttctcgtaccgctatccgctggtggacggccaggggaactggggggcgccggacgatcccaagtcgtttgcggcgatgcgttataccgaatcgcgcctctccaaatacgccgaagtgctgctggccgagctggggcagggcaccgtcgactggatcccgaactttgacggcacgctgcaagagccgaagatgttgccggcgcgcttgccgaacatcctgctgaacggcaccaccggcatcgccgtcggcatggcgaccgacattccgccgcacaacgtgcgcgaagtcgccgccgctgcggtggcgctgctcgacaaacctggcgcctcgctcgacgatctgctcgaattcgtgcaggggccggacttcccgaccgaagccgagatcatcaccccgcgcgatgaaatccgcaaaatttaccagagcggccgcggctcggtgcgcatgcgcgctgtgtggaagaaagaagacggcagcgcggtgatcaccgccttgccgcaccaggtgtccggcgccaaggtgctggagcagatcgccagccagatgcgcgccaagaaactgccgatggtcgaagatctgcgcgatgagtccgaccacgaaaacccgacgcgtctggtgatcgtgccacgctccaaccgtatcgatctggaacaggtgatgaaccacctgttcgccaccaccgatctggaacgcagctaccgcatcaacatgaacatgatcggtctggataaccgcccgcaggtcaaagggctggtggagatcctcaccgaatggctggcctaccgtcgcgacacggtgcgccgccgcctgaactaccgcctcgagaaagtgctgaaacgcctgcatatcctcgaaggtttgctggtggcgttcctcaatatcgacgaggtgatccacatcatccgcagcgaagatgagccgaagccggtgctgatgcagcgtttcggcatctccgatacccaggcggaagcgatcctcgagctgaaactgcgtcacctggccaagctggaagaggtcaagatccgcggtgagcaggatgagttggcgaaagagcgcgatcagctgcaggcgctgctggcgtccgaacgcaagctgaacacgctgatcaagaaagagatccaggccgatgcgcagacctacggcgacgatcgccgttcgccgctgaccgagcgcgcggaagccaaggcgatgagcgagcacgacttcgtgccgtccgagccggtgaccatcgtgctgtcggaaatgggctgggtgcgcagcgccaagggccacgacatcgatccggccggcctgagctacaaggccggcgacagcttccgcggcgcggcgcgcggcaagagcaaccagccggtggtattcatcgactccaccgggcgcagctatgcgctcgatccgatgacgctgccttcggcgcgcgggcagggcgagccgctgaccggcaagctgacgccgccgccgggcgccaccattgagcaagtgctgatggcggccgacgatcagaagctgctgatggcgtccgatgccggttacggcttcgtttgcaccttcaacgatttggtggcgcgcaaccgcgccggcaaggtgatgatcacgctgccggacaacgccagggcgctgccgccgatggaaatccacggcgcagacgatatgctgctgtcgatcaccgccgccgggcgcatgctgatgttcccggtcgccgatctgccgcagctgtcgaagggcaaaggcaacaagatcgtctccattccggcagcccaggcggcggccggtgacgacaagctggcctggctgttcgtgctgccgccgcaggcgtccgtcacgctgcacgtcggcaaacgcaagctgacgctgcggccggaggatttgcagaaattccgcgccgagcgcgggcgcaagggcacccagctgccgcgcggcctgcagcgcatcgatcgcgtcgaagtggatgcgccggtgcgggcgtcgggcggcgacagcgaagagtaa

SEQ ID NO: 7130 - protein, 757 aa, Serratia marcescens
  misc_feature (88)..(88): Xaa can be any naturally occurring amino acid
MSDLTHDGVERLPLHTFTENAYLNYSMYVIMDRALPYIGDGLKPVQRRIIYAMSELGLNNSAKFKKSARTVGDVLGKYHPHGDSACYXAMVLMAQPFSYRYPLVDGQGNWGAPDDPKSFAAMRYTESRLSKYAEVLLAELGQGTVDWIPNFDGTLQEPKMLPARLPNILLNGTTGIAVGMATDIPPHNVREVAAAAVALLDKPGASLDDLLEFVQGPDFPTEAEIITPRDEIRKIYQSGRGSVRMRAVWKKEDGSAVITALPHQVSGAKVLEQIASQMRAKKLPMVEDLRDESDHENPTRLVIVPRSNRIDLEQVMNHLFATTDLERSYRINMNMIGLDNRPQVKGLVEILTEWLAYRRDTVRRRLNYRLEKVLKRLHILEGLLVAFLNIDEVIHIIRSEDEPKPVLMQRFGISDTQAEAILELKLRHLAKLEEVKIRGEQDELAKERDQLQALLASERKLNTLIKKEIQADAQTYGDDRRSPLTERAEAKAMSEHDFVPSEPVTIVLSEMGWVRSAKGHDIDPAGLSYKAGDSFRGAARGKSNQPVVFIDSTGRSYALDPMTLPSARGQGEPLTGKLTPPPGATIEQVLMAADDQKLLMASDAGYGFVCTFNDLVARNRAGKVMITLPDNARALPPMEIHGADDMLLSITAAGRMLMFPVADLPQLSKGKGNKIVSIPAAQAAAGDDKLAWLFVLPPQASVTLHVGKRKLTLRPEDLQKFRAERGRKGTQLPRGLQRIDRVEVDAPVRASGGDSEE

SEQ ID NO: 7131 - DNA, 1413 bp, Serratia marcescens
  misc_feature (1340)..(1340): n is a, c, g or t
atgatgaaaaaactcagctatttggcgataacaacagggcttttcctctccgcttccagcgcagcggcctcgggcagcggcagcatcgaggcgcgtctcaacgcgctggaacaacgtctggcgctggcggaacggcgcgccgcacaggctgaaacccgcgcgacggcggcggaacgtcgggcgcaacagctggaacaacgcaccaccaacaccgaacggcaaaccgcgcagattgcacagcatgccgccacgccggaaacaccgattgccaactccagcgtgctgaaacttagcggattcaatgacctgaagctgtacggggatgtggagttcaatctggacggcgccagccgcagcggccaactgacgtcgctgaaaggcagcgaccacaaggactggaaacccggcaacaaagaacgttgggatatcaacggccgcattctggtcgggctggacggctaccgccgcaatccggacggcaacttctccggcttcagcgtgcagccgctggcggacatgaccggcaaaatgaacctggacgacgccgccttcttcttcggtaatgaaaagaactggcaaaccaaaatcggccgctttgaagcctacgacatgttcccgctgaatcaggacaccttcattcaatactccggcaataccgccaacgatctgtacgccgacggcttcggctatatctacatgatgaaagagggccgcggccgcagcagcagcggcggcaacctgatgctgagcaaatacgccggtgatgtctatttcgagctgaacacgctggtggaggacggcacttcgctgttccaggacaacagctaccacggcaacgccctggacaataagaaaaacgtcgcctatttacggccggtgatcgcctggaaaaaagacgccttcagcatcgcggcggcgatggaaagcaacgtggtgaataacgcctacggctatcgggacagccagggccgtttcgtcgatcagtccaagcgcaacggctacggcatgacgatgagctggaacaacagcgccgccgatccggacaacggcgtggtggccaacctgagcaccgcctatctggatgcctcaggcgagcaagacttcaccgccggcgtcaacgtgctgtggcggcgcttcgaactgggttatatctatgctcataacaatatcaaagagttcaataccgccgggatcgccgccgatatccacaacccgctcagcgaaccgggcaactacgacatccacaccgttcacgcgtcgtatcagatacctaacattatgaatatgaagaatttcaatttgtatttgggcgcctatgtgtcgctgctggaagccaacgncgacaacaagatagccaacggcgacagcgatcaacgttacggcatgcgcgccagattcaagtatttcttctga

SEQ ID NO: 7132 - protein, 470 aa, Serratia marcescens
  misc_feature (447)..(447): Xaa can be any naturally occurring amino acid
MMKKLSYLAITTGLFLSASSAAASGSGSIEARLNALEQRLALAERRAAQAETRATAAERRAQQLEQRTTNTERQTAQIAQHAATPETPIANSSVLKLSGFNDLKLYGDVEFNLDGASRSGQLTSLKGSDHKDWKPGNKERWDINGRILVGLDGYRRNPDGNFSGFSVQPLADMTGKMNLDDAAFFFGNEKNWQTKIGRFEAYDMFPLNQDTFIQYSGNTANDLYADGFGYIYMMKEGRGRSSSGGNLMLSKYAGDVYFELNTLVEDGTSLFQDNSYHGNALDNKKNVAYLRPVIAWKKDAFSIAAAMESNVVNNAYGYRDSQGRFVDQSKRNGYGMTMSWNNSAADPDNGVVANLSTAYLDASGEQDFTAGVNVLWRRFELGYIYAHNNIKEFNTAGIAADIHNPLSEPGNYDIHTVHASYQIPNIMNMKNFNLYLGAYVSLLEANXDNKIANGDSDQRYGMRARFKYFF

SEQ ID NO: 7133 - DNA, 1209 bp, Serratia marcescens
  misc_feature (407)..(407): n is a, c, g or t
atgacgcagaaaatagtgattgccggttccggttttgccggtttttgggccgccgtgtccgccatgcgcgccattaccctcgccggtaagcatgacgagatcgaggtgctcatggtttcgccgacgccaacggtcaccatccggccgcgcctgtatgaagcggtgctggaaaacatgaacccggacatttccgcgcagctcgccgccgtcggcgtgcgccacctggccgggacggtagaacgcatcgacgccgccgccaaaacgctcacggtggcgcaggcgacggggggatcccttgagctggtctacgaccgcctggtgtgggccaccggcagtcggctctccgtgcctgcggtgccgggctttgccgaatacggtttcaacgtcgatacgctggaaagcgcgcngcgtttggatgcccatatcaaagcgctggcggccaaaccctcgacgccggcgcgcaacaccgccgtggtggtgggtgcggggctgaccgggctggagagcgcggcggagatgccgcagcggctgcgggatgtgctgggcaaagacgagaacgtgcgcgtggtgatcgtcgatagcgcgccggaagtgggcgccgggatgggggcggagccgggggcggtgatacgccaggcgctggcggagtgcggcgtggaggcgcgggccggcctgcgcgtctcggccatcgacgccgagggggtgatgctgtcgaacggtgagcgcatcgccgccaacacggtgatcctggcggcgggcgtgcgggcgcatccgctgaccgagcagatccccggcgagcgcgacggcagcggccgggtgatcggcgatgccttcctgcgcgcgccggcggcggcgggcattttcgtgaccggggatacggtgaaggcggcgaccgacgatctcggcaaccacaacctgatgacctgccagcatgcgatgagtcttggccgcgtggccggccacaatgcggcggcggagctggcgggattgccgacgcacccgtacagccagccgaagtatgtgacctgtctggatctggggccttggggcgcgctgtataccgaaggctgggatcgccaggtgcgttttacccgtcaggaaggcaaaaagattaagcaggagatcaatacgcagtggatttatccaccggcggcggatcgcgaggcgctgttcgccgtagccaatccggatttcgtgattgtgccttaa

SEQ ID NO: 7134 - protein, 402 aa, Serratia marcescens
  misc_feature (136)..(136): Xaa can be any naturally occurring amino acid
MTQKIVIAGSGFAGFWAAVSAMRAITLAGKHDEIEVLMVSPTPTVTIRPRLYEAVLENMNPDISAQLAAVGVRHLAGTVERIDAAAKTLTVAQATGGSLELVYDRLVWATGSRLSVPAVPGFAEYGFNVDTLESAXRLDAHIKALAAKPSTPARNTAVVVGAGLTGLESAAEMPQRLRDVLGKDENVRVVIVDSAPEVGAGMGAEPGAVIRQALAECGVEARAGLRVSAIDAEGVMLSNGERIAANTVILAAGVRAHPLTEQIPGERDGSGRVIGDAFLRAPAAAGIFVTGDTVKAATDDLGNHNLMTCQHAMSLGRVAGHNAAAELAGLPTHPYSQPKYVTCLDLGPWGALYTEGWDRQVRFTRQEGKKIKQEINTQWIYPPAADREALFAVANPDFVIVP

SEQ ID NO: 7135 - DNA, 426 bp, Serratia marcescens
  misc_feature (361)..(361): n is a, c, g or t
atgcagataagaccctaccaagagaccgatcgccctttcctgcgcacgctgtacctggcgtcgcgcaaggcggcgttcggctggcgcgatacctcaaactatcagttggaagatttcgacggcgcgacgctgggcgaagcgatttgggtggcggaagacggcggcgtgctgctgggattcgtctccgtctaccgcgaagacaacttcattcataacctgtatgtcgctccccatcagccgccgcgcggcgtcggcagtgcgctgctgcaggcggcggaagctaccttcaccgccaccggctcgctgaaatgcctggtgaagaatgaaaaggcgctggcgttctaccgcaaacacggctggngcatcatctctaccggcaacgacggcgaagaagattattacctgctgcattcgccggcccgctaa

SEQ ID NO: 7136 - protein, 141 aa, Serratia marcescens
  misc_feature (121)..(121): Xaa can be any naturally occurring amino acid
MQIRPYQETDRPFLRTLYLASRKAAFGWRDTSNYQLEDFDGATLGEAIWVAEDGGVLLGFVSVYREDNFIHNLYVAPHQPPRGVGSALLQAAEATFTATGSLKCLVKNEKALAFYRKHGWXIISTGNDGEEDYYLLHSPAR

SEQ ID NO: 7137 - DNA, 1662 bp, Serratia marcescens
  misc_feature (1270)..(1270): n is a, c, g or t
atgtcttccataaccaaaactccacctgccgcatcgccgcgtggcgcgatgctgaacctgatcagacggctgcatttttatatcggcctgctggtcgctccttttattctggtcgctgcactgaccggcacgctgtatgtgttgacgccgcagcttgaagaggcgctgtatcgcgatgcgcttttcaccgaaccgcacggacaggcgagatcgctggctgaccagatcgccgccgcccgccgtgcggcgggtgacgagacgcgcatttacgccgtgcgcccggcacccggcgcaatggacaccacgcgcgtacagttcgcgagtgccgatctgggcgcttccgagtcgcgcgcgctgtttgtcgacccttacactctggcgatcaagggcgatatgacggtgtacggcacctccggcgtgctgccgctgcgcacctggctggataagttgcacagcagcctgctgctcggcgatctggggcgcaactacagcgagctggcggcctcctggctgtgggtggctgcgctgggcggcgtggcgctgtggctggcgacgcggccgaagcgcaagctgaaaaaggcgaaagggggcttcgccgccagccgccattggcatatcacgctgggtgtggcgctgctggccgggctgctgttcttctcggctaccgggctgacctggtcgcagtgggccggcggcaacatcgacgcgctgcgggccaacctgggctggctgacgccgcaggtcaacaccagcctgcaggccgatacgccgcagacgccggccgatccgcacgccgagcaccgcgggatgatggcgggcatgaagatggccccagccgcgcagagcaatgcgctgaacggcgactgggatcgggcgctgtacgccgcgcgcgccgctggaatagacgccgccaaggtcgagctgcgccagccgaaaggcgagggcaaagcctggacggtgaccgaagtggatcgcagctggccgacgcaggtggacgcggttgccatcgcgccgcaaagcttcgccgtcgtcgaccagctgcggttcgacactttcccgctgatcgccaagctgacccgctggggcatcgacgcccacatgggcattctgttcggcttgccgaatcagctgctgctggcggcgttcggccttgggctgtgcttgatgatcgcgctgggttaccgcatgtggtggatccgccgcccggcggcgggggcgcagcatccggtgcatacgctggtcgccgcctggctggcgctttccctaccgncgcgcgccggcacgctgctggtggcagcggcgctgggttattgcctgccggtgatgggcgtgagcctcgcggcgttgctgctggcggacgtgtggcgctggcgcggccaacggcaaagccaccgggacgaaacgccggaagcggccgccagacgcgccgaggtgcgtaagttccgcgcggcggtggcgacggtggctgtggcggtcggctgcgtgatgggccgagcgatcctcggcggcaccgtcgagcaattccagctgccgatcggcacctggagcgcccagatggtgatcatgcagagcctgatggtgctgctgtatacgctggtgttcaccctgctgctttccattccgctgtggtatttctttctgggggagaaagaggggcggtga

SEQ ID NO: 7138 - protein, 553 aa, Serratia marcescens
  misc_feature (424)..(424): Xaa can be any naturally occurring amino acid
MSSITKTPPAASPRGAMLNLIRRLHFYIGLLVAPFILVAALTGTLYVLTPQLEEALYRDALFTEPHGQARSLADQIAAARRAAGDETRIYAVRPAPGAMDTTRVQFASADLGASESRALFVDPYTLAIKGDMTVYGTSGVLPLRTWLDKLHSSLLLGDLGRNYSELAASWLWVAALGGVALWLATRPKRKLKKAKGGFAASRHWHITLGVALLAGLLFFSATGLTWSQWAGGNIDALRANLGWLTPQVNTSLQADTPQTPADPHAEHRGMMAGMKMAPAAQSNALNGDWDRALYAARAAGIDAAKVELRQPKGEGKAWTVTEVDRSWPTQVDAVAIAPQSFAVVDQLRFDTFPLIAKLTRWGIDAHMGILFGLPNQLLLAAFGLGLCLMIALGYRMWWIRRPAAGAQHPVHTLVAAWLALSLPXRAGTLLVAAALGYCLPVMGVSLAALLLADVWRWRGQRQSHRDETPEAAARRAEVRKFRAAVATVAVAVGCVMGRAILGGTVEQFQLPIGTWSAQMVIMQSLMVLLYTLVFTLLLSIPLWYFFLGEKEGR

SEQ ID NO: 7139 - DNA, 405 bp, Serratia marcescens
  misc_feature (163)..(163): n is a, c, g or t
atgaatccgctggtttatttctccagcaactcggagaacacccatcggttcgttgagaaactgggcctgccggcgatccgcattccgatcgccggtgcccgcagcaaattgctgatggaacacccctttatcttgatcgtacccagctatggcggcggcagcnccgtcggcgcggtgccgatccaggtgatccgctttctcaacgttccgcaaaaccgttcatacctgcgcggcgtcatcgccgccgggaacaccaacttcggcgcggcgtacggcatcgccggcgacatcatcgccaaaaaatgccaggtgccttttttataccgctttgagctgctcggcactacgcaagacgttgaaaacgttagacagggagtaaccgcattttggcaacgacagaactga

SEQ ID NO: 7140 - protein, 134 aa, Serratia marcescens
  misc_feature (55)..(55): Xaa can be any naturally occurring amino acid
MNPLVYFSSNSENTHRFVEKLGLPAIRIPIAGARSKLLMEHPFILIVPSYGGGSXVGAVPIQVIRFLNVPQNRSYLRGVIAAGNTNFGAAYGIAGDIIAKKCQVPFLYRFELLGTTQDVENVRQGVTAFWQRQN

SEQ ID NO: 7141 - DNA, 2145 bp, Serratia marcescens
  misc_feature (1213)..(1213): n is a, c, g or t
ttggcaacgacagaactgaccaggcccgaaacgggcgcgctggattaccattcgctcaacgcgatgctcaatctttacgatgcggaaggccggatccagttcgataaagatcggctggcggcgcggcactacttcctgcagcacgtcaaccaaaacaccgtgttcttccacaacctggaggaaaagctgcgctatctggtggaggaaggctactacgagccgcaggtgctggcgcagtacgaattcccgtttatcaagcagctgtttcagcaggcctacgccaaaaaattccgcttcgagaccttcctcggcgccttcaagtactacaccagctatacgctcaaaaccttcgacggcaagcgctatctggaacgctacgaagaccgggtgtgcatggtggcgctgacgctggcggcgggcgacaccgccctggcgcaggatctggtggaggagatgatttcgggccgcttccagccggccacgccgaccttcctcaactgcggcaaacgccagcgcggtgagctggtctcctgcttcctgctgcgcatcgaagacaatatggaatcgatcggccgggcggtgaactccgcgctgcagctgtcgaaacgcggcggcggcgtggccttcatgctgagcaatattcgcgaggtgggcgcgccgatcaagcgcatcgagaaccagtcctccggcgtcattccgatcatgaaaatgctcgaagacgccttctcctacgccaaccagctcggcgcgcgccagggggccggcgcggtgtatctcaacgcccaccacccggacattctgcgttttctcgacaccaagcgcgaaaacgccgacgagaagatccgcatcaaaacgctgtcgctgggggtggtgatcccggatatcaccttcgagctggcgaagaacaacgaagagatgtacctgttttcgccctacgacgtcgaacgggtgtatggcgtgccgttttcggagattgccgtcagcgagaagtaccgcgagatggtggacgacaagcgcatccgcaagtcgcgcatcaacgcgcgcgagttcttccaggtgctggcggagatccagttcgaatccggctacccctatgtgatgttcgaggacacggttaaccgggagaacccgatcgccgggcggatcaacatgagcaacctgtgttcggagatcctgcaggtcaaccgcgccagcacgtatcacgaggatctgngctacgatcgcatcggcaaggacatctcctgcaacctcggctcgctgaacatcgccaaaaccatggacgcgccggacttcggcaaggcgatcgagaccgcgatccgcgcgctgaccgcggtggccgacatgagcgatatccgctcggtgccgtcgatcgccgaaggcaaccgcagcgcccgcgccatcggtttgggccagatgaacctgcacggttacctggcgcgcgagcgcatcttctacggctcggaagaaggcatcgacttcaccaacctctatttctataccgtggcctatcacgccatccgcgcctctaaccggctggcgatcgagcgcggcggcgccttcgacggctttgagcattcccgctatgccagcggcgagtacttcgataagtacaccgagcgcgactggctgccgcagaccgagcgggtgcgcgagctgttcgccgccgccggcatcgccattccgaaccgcgacgactggcgcgcgctgcgccagtcggtgatgctgcacgggctgtacaaccagaacctgcaggcggtgccgccgaccggttccatctcgtacatcaataacgccacctccagcatccacccgatcgtttcacgcatcgagatccgcaaggaaggcaagatcggccgcgtttactacccggcgccctacatgaccaacgacaacctggcgtattaccaggatgcctatgagattggcccggaaaagatcatcgatacctacgccgccgccacgcaacacgtcgatcaggggctgtcgctgacgctgttcttccgcgataccgccaccacccgcgatatcaaccgcgcgcagatctacgcctggcgcaaaggcatcaagaccatttactacatccgcctgcgccaaatggcgctggaaggcaccgaggtgcagggctgcgtgtcctgcgcgctgtga

SEQ ID NO: 7142 - protein, 714 aa, Serratia marcescens
  misc_feature (405)..(405): Xaa can be any naturally occurring amino acid
MATTELTRPETGALDYHSLNAMLNLYDAEGRIQFDKDRLAARHYFLQHVNQNTVFFHNLEEKLRYLVEEGYYEPQVLAQYEFPFIKQLFQQAYAKKFRFETFLGAFKYYTSYTLKTFDGKRYLERYEDRVCMVALTLAAGDTALAQDLVEEMISGRFQPATPTFLNCGKRQRGELVSCFLLRIEDNMESIGRAVNSALQLSKRGGGVAFMLSNIREVGAPIKRIENQSSGVIPIMKMLEDAFSYANQLGARQGAGAVYLNAHHPDILRFLDTKRENADEKIRIKTLSLGVVIPDITFELAKNNEEMYLFSPYDVERVYGVPFSEIAVSEKYREMVDDKRIRKSRINAREFFQVLAEIQFESGYPYVMFEDTVNRENPIAGRINMSNLCSEILQVNRASTYHEDLXYDRIGKDISCNLGSLNIAKTMDAPDFGKAIETAIRALTAVADMSDIRSVPSIAEGNRSARAIGLGQMNLHGYLARERIFYGSEEGIDFTNLYFYTVAYHAIRASNRLAIERGGAFDGFEHSRYASGEYFDKYTERDWLPQTERVRELFAAAGIAIPNRDDWRALRQSVMLHGLYNQNLQAVPPTGSISYINNATSSIHPIVSRIEIRKEGKIGRVYYPAPYMTNDNLAYYQDAYEIGPEKIIDTYAAATQHVDQGLSLTLFFRDTATTRDINRAQIYAWRKGIKTIYYIRLRQMALEGTEVQGCVSCAL

SEQ ID NO: 7143 - DNA, 306 bp, Serratia marcescens
  misc_feature (154)..(154): n is a, c, g or t
atgaccgacacctcccccactccctggcacctctacatgctgcgtttaccgagcggcatgctgtataccggcatcaccaccgacgtggcgcgccgcctggcgcagcatcaagccggcaaaggcgccaaggcgctgcgcggaaaaggagaactgncgctggcatttcactgccaggtgggggatcgctcaacggcgctgaagctggaataccgcgtcaaacagctgagcaaaatacaaaaagagcggctggtgaatcacccgccgctgtcgttggagtatctattgccggtcgttaaaagcgattaa

SEQ ID NO: 7144 - protein, 101 aa, Serratia marcescens
  misc_feature (52)..(52): Xaa can be any naturally occurring amino acid
MTDTSPTPWHLYMLRLPSGMLYTGITTDVARRLAQHQAGKGAKALRGKGELXLAFHCQVGDRSTALKLEYRVKQLSKIQKERLVNHPPLSLEYLLPVVKSD

SEQ ID NO: 7145 - DNA, 567 bp, Serratia marcescens
  misc_feature (238)..(238): n is a, c, g or t
atgtcagaccaagccttgaaaatcgtcactctgctcggcagcctgcgcaaaggctcctacaacgccatggtggcccgcgccctgcctgggctggccccacaaggcgtcacaattgaagcgctgccttccatccgcgatatcccgctgtacgacgccgacatgcaacagggtgaaggcttccctgccgctgtcgaggcgatcgccgaacagatccgccaggccgacggcgtgatcatcntcacccctgaatataactattccgtgcccggtgggttgaagaacgccatcgactggctgtctcgcttgccgaatcagccgctggccggcaagccggtcgccattcagaccagctcgatggggccgatcggcggcgcgcgctgccaataccacctgcgccagatcctggtgttcctcgatgcgatggtaatgaacaagcctgagtttatgggcggcgtgatccagagcaaggtcgacgaacaggccggtgaactgagcgatcagggaacgctggattttctgaccggccagctgtctgcgttcagcgattttattcgccgcgtggagtga

SEQ ID NO: 7146 - protein, 188 aa, Serratia marcescens
  misc_feature (80)..(80): Xaa can be any naturally occurring amino acid
MSDQALKIVTLLGSLRKGSYNAMVARALPGLAPQGVTIEALPSIRDIPLYDADMQQGEGFPAAVEAIAEQIRQADGVIIXTPEYNYSVPGGLKNAIDWLSRLPNQPLAGKPVAIQTSSMGPIGGARCQYHLRQILVFLDAMVMNKPEFMGGVIQSKVDEQAGELSDQGTLDFLTGQLSAFSDFIRRVE

SEQ ID NO: 7147 - DNA, 1146 bp, Enterobacter cloacae
  misc_feature (1022)..(1022): n is a, c, g or t
atgaaagcattacattttggcgcagggaacatcggccgcggttttatcggcaagctgctggcggacgccggggttgagctgaccttcgccgacgtcaatcaaacggtgctggatctgttgaacagccgtaaaagttatcaggtgcacgtggtgggcgagcaagaacgcgtggagagcgtcaacaacgtcagcgccgtcaacagcggcagcgaggcggcggtggcgctgatcgccgaggcggatctggtgaccactgccgttggcccgcaaattctcggcaaaatcgccggcacgatcgccaaagggctggtgctgcgtcatcagcagggcaatgcgcagccgctgaatatcatcgcctgcgagaacatggtgcgcggcaccagccagctgaagcagcatgtgttcgctgcgctgccgcaggacgaacaggcatgggttgagcagcacgtcggcttcgtcgattcggccgtcgaccgcatcgtgccgccggcggacagcagcgatccgctggaagtgacggtggaaaccttcagcgaatggatcgtcgatcagacccagttcaagggccagcctccggcgatcgccggcatggagctgaccgataacctgatggcgttcgtcgagcgcaagctgttcaccctcaataccggccacgccatcaccgcctaccttggccaacgggccgggctgcaaaccattcgcgacgccattctcgacccggcgatccgccgcgtggtgaaaggagcgatggaagagagcggtgcggtgctgatcaagcgctacggcttcgacgccgacaagcacgccgcctacatcaacaaaatcctcggccgcttcgaaaacccgtatctgcacgacgacgtcgagcgcgtggggcgccagccgctgcgcaaactgagcgccggcgatcgcctgatcaaaccgctgctgggcacgctggaatacggcctgccgcacgccaacctgatccagggcatcgccgccgccatgagctaccgcagcgaacaggatccgcaggcgcnggagttggcggaattgctgaacacgctcgggccgaaagccgcgctggcgcaaatttccggcctgccggcggaaagcgaggttgtagaagaggccgttgctgtgtataacgccatgcacaagtag

SEQ ID NO: 7148 - protein, 381 aa, Enterobacter cloacae
  misc_feature (341)..(341): Xaa can be any naturally occurring amino acid
MKALHFGAGNIGRGFIGKLLADAGVELTFADVNQTVLDLLNSRKSYQVHVVGEQERVESVNNVSAVNSGSEAAVALIAEADLVTTAVGPQILGKIAGTIAKGLVLRHQQGNAQPLNIIACENMVRGTSQLKQHVFAALPQDEQAWVEQHVGFVDSAVDRIVPPADSSDPLEVTVETFSEWIVDQTQFKGQPPAIAGMELTDNLMAFVERKLFTLNTGHAITAYLGQRAGLQTIRDAILDPAIRRVVKGAMEESGAVLIKRYGFDADKHAAYINKILGRFENPYLHDDVERVGRQPLRKLSAGDRLIKPLLGTLEYGLPHANLIQGIAAAMSYRSEQDPQAXELAELLNTLGPKAALAQISGLPAESEVVEEAVAVYNAMHK

SEQ ID NO: 7149 - DNA, 1467 bp, Serratia marcescens
  misc_feature (71)..(71): n is a, c, g or t
gtgaccctgctcgatgaaaccccggatacccgttacctgcagctggcggatacgctggccgaggccattcnccgcggcacgctgctgcccggcgaccgcttgccttcggtgcggcgctgtgcgcaaacccatcgcgtcagtattaataccgtggtgtcggcttaccgcacgctggaggatcgcgggctgatcgaagcgcggccgcaatcggggttttatgtccgcagcacgctgccggcgctgaagatggcctcggcgcccagcggccgcatcgagccgccggcggacgacgtgctggcgctgatcgatactgtgttcgccgcccagcagaatccggccttcaccaacattgcgctggcctgcccgcagaccagcgatttttatcccggcggcaagctggggcgcatgctgtcctctcagctgcgccgtcaaccggatctgatcggccagtattcgttgccgcccggcagcctgcggctgcgtcagcagatcgcccgccgttcgatgacgctgggcatgctgctggagccgggcgacgtggtgctgacccacggctgcatggaggcgttgcagctggcgctgcgcgtcaccaccaaaccgggcgactgcgtcgggctggagtcaccgacctacttctacctgctgccgctgctggccagcctggggctgaaagcgctggaaatccccaccgatccgcagctggggctgtcgctggacgcgctggagctgctattgaacgagaaacggctgaacgcggtgattgccatgccgacggtgcaaaacccgctgggctgcaccatgccgctggcggcgaaaaagcggctggcgcggctgatgaacgatcatcaggtgccgttgattgaagacgggctgtatgccgagatccagttcggcggcgcgttgtcgccggcggtgaaggcgttcgatcgtgacggctgggtgctgttttgctccagcttcaccaaaacgctggcgccggattttcgcgtcggctggatctgcggcggccgctttcacgaggcgttgcgcaagctgaaggcggtgtcgtcgatgtccgagtcgcagctgctgtcggaaacgctggcgaccttcctggagagcggcggttacgatcaccatttgcgcaacctgcgcaagcgctatgcggcgcaggtagacgaggcgcgggcgctgatcgcccggcatttcccgcgcggcacgctggccacgcagccggcgggcggcttcgtgttttgggttgagttcccccccaacgtggacagcgtagcgctgttccaccaactgctggaagagcagatctgtttgacgccgggcaccctgtattcccccagcgggcgctaccgcaacgcgctgcggctctcctgttgctacccgttcaacgcgcgctacacccaggcgttggcccggctcggcgccagagcctgcgagatgagcggcctgccgcccggcattgcgcaggacgggtaa

SEQ ID NO: 7150 - protein, 488 aa, Serratia marcescens
  misc_feature (24)..(24): Xaa can be any naturally occurring amino acid
MTLLDETPDTRYLQLADTLAEAIXRGTLLPGDRLPSVRRCAQTHRVSINTVVSAYRTLEDRGLIEARPQSGFYVRSTLPALKMASAPSGRIEPPADDVLALIDTVFAAQQNPAFTNIALACPQTSDFYPGGKLGRMLSSQLRRQPDLIGQYSLPPGSLRLRQQIARRSMTLGMLLEPGDVVLTHGCMEALQLALRVTTKPGDCVGLESPTYFYLLPLLASLGLKALEIPTDPQLGLSLDALELLLNEKRLNAVIAMPTVQNPLGCTMPLAAKKRLARLMNDHQVPLIEDGLYAEIQFGGALSPAVKAFDRDGWVLFCSSFTKTLAPDFRVGWICGGRFHEALRKLKAVSSMSESQLLSETLATFLESGGYDHHLRNLRKRYAAQVDEARALIARHFPRGTLATQPAGGFVFWVEFPPNVDSVALFHQLLEEQICLTPGTLYSPSGRYRNALRLSCCYPFNARYTQALARLGARACEMSGLPPGIAQDG

SEQ ID NO: 7151 - DNA, 1389 bp, Enterobacter cloacae
  misc_feature (623)..(623): n is a, c, g or t
gtggaaaaccctcaacaaccgggccgcagagccttcctcagccaaaccggcaaacttaccaccgcctgtgcggtgatcggccttacgggcggcatggcgcaggccgcgtcaccgggcgacgggcagtgcgcaccggcaccgatgaccctgaccgatcgccactactgcctgagcgaggtgcggctggaagacggctttgaatacgacggcgaaacggtgatcggcacccgcaccgcgctgtacacgctggagatcaaagacggcaagatcgccgccattcacgccgccaacgccgcgttgcccgccggcgtgccccgctataaggcgcagggccagctgctgctgccggcgtttcgcgacatgcacatccacctggacaaaaccttctacagcggcccgtggcaggcgccgcgcccgcgccagggcaagaccatcatggacatgatcgcactggagcagacgctgatcccgaaactgctgcccacctcgcagcagcgggcggaaaatctgatcgccctgctgcagtccaagggcagcaccgtggcacgcagccactgcaatatcgatccggtcagcggcctgaaaagcctggagcacctgcagcgcgcgctggaaaaacaccnggcggacttcagctgtgaaatcgtcgccttcccgcagcacgggctgttgcactccaaagtcgatgcgctgatgcgcgaagcgatgcagatgggcgtgcagtacgtcggcgggctggatccgaccaacgtcgacggcgcgatggagcaatcgctggacgccatgttccagatcgccctcgataccggcaaaggcgtggatatccacctgcatgagaccagcccggccggggtcgccgccatcaactatatgatcgccaccgtggagcaaaacccggcgctgcgcggcaaggtcaccatcagccacgctttcgccctgaccacgctgacgccgggcgaactggcggaaaccgccacccggctggcggcgcagcagatcaccatcgcctccacggtgccgatcggcggcctgatgatgccgctgccgcagctcagcgagaaaggggtgttcgtgatgaccggcaccgacagcgtgatagaccactggtcgccgttcggcaccggcgacatcctggagaaggccaacctgtacgcccagctgtaccgtggctccgacgagtatcacctgtcgcgcgccatggccatctccaccggcggcgtgttgccgctggacgataagggccagcgcgcctggccaaaagccggcgacgccgccgagttcgtgctggtcaacgccagctgttccgccgaggcggtcgcccgcctgccggcgcgcagcgccaccttccatcaggggcgtctggtggccggccaggtgagcaaagcctaa

SEQ ID NO: 7152 - protein, 462 aa, Enterobacter cloacae
  misc_feature (208)..(208): Xaa can be any naturally occurring amino acid
MENPQQPGRRAFLSQTGKLTTACAVIGLTGGMAQAASPGDGQCAPAPMTLTDRHYCLSEVRLEDGFEYDGETVIGTRTALYTLEIKDGKIAAIHAANAALPAGVPRYKAQGQLLLPAFRDMHIHLDKTFYSGPWQAPRPRQGKTIMDMIALEQTLIPKLLPTSQQRAENLIALLQSKGSTVARSHCNIDPVSGLKSLEHLQRALEKHXADFSCEIVAFPQHGLLHSKVDALMREAMQMGVQYVGGLDPTNVDGAMEQSLDAMFQIALDTGKGVDIHLHETSPAGVAAINYMIATVEQNPALRGKVTISHAFALTTLTPGELAETATRLAAQQITIASTVPIGGLMMPLPQLSEKGVFVMTGTDSVIDHWSPFGTGDILEKANLYAQLYRGSDEYHLSRAMAISTGGVLPLDDKGQRAWPKAGDAAEFVLVNASCSAEAVARLPARSATFHQGRLVAGQVSKA

SEQ ID NO: 7153 - DNA, 1332 bp, Serratia rubidaea
  misc_feature (1216)..(1216): n is a, c, g or t
atgtggtctttccttaaaagccgcccggacgcgccgcaggtcaccgatcaacggcagatcgacgccagctacaaatactggcgcatccagctgatgtgcaccatgtacatcggctacgccgcgttttacttcacgcgcaaaagtttcaacttcatcatgccggcgatgctgagcgatctgggcctgacgatgtccgacgtcggcatcctcggcacgctgttctacatcacctacggctgctcgaaattcatttccggcatgatcagcgatcgctccaacccgcgttactttatggggctgggcctgatcatgaccggggtgctgaatatcttcttcggcctcagttcgtcgctgctgatgctgggcacgctgtggatcctcaacgccttcttccagggctggggctggccgccgtgctccaaaatcctcaccagctggtattcgcgctccgagcgcggtggctggtgggcgatctggaacacctcgcacaacgtcggcggcgcgctgatcccgctgctggtgggctttatctcgctgcacttcagctggcgttacggcatgatcattcccggtatcatcggcgtggtgcttggcttgctgatgtgctggcgcctgcgcgacaagccatccaccctggggctgccgagcgtcggcaaatggcgcaacgacgccatggagctggtgcaggaatcggaaggccaggggctgagcaaccgcgagatcatcaaacgttacgtgctgaccaacaagtacatctggctgctggcggtctcttacgtgctggtgtacatcgtgcgtaccgcgatcaacgactggggcaacctctacctgacgcaggaaaagggctattcgctgatgaccgccaactcggccatttcgctgtttgaagtgggcggctttatcggttcgctggtggccggttggggttccgacaagttgttccgcggcaaccgtggcccgatgaacctgatcttcgccatcggtatcttcctgtcggtggcggcactgtggttgatgccgggcgtgacctacctgctgcaggcctgctgcttcttcgccatcggtttcttcatcttcggcccgcagatgctgatcggcatggcggcggcggagtgctcgcacaaggatgcggcgggcgcggcgaccggttttgtcggcctgttcgcctacctgggcgcggcgctgtccggctacccgattgcgcgggtgatggagntctggcagtggaacggcttcttcgtggtgatttccatcgccgcctgcctgtcggcgctgttcctgctgccgttcctgcgcgcgcagacgccggcgctgaaaccggccaaagcctga

SEQ ID NO: 7154 - protein, 443 aa, Serratia rubidaea
  misc_feature (406)..(406): Xaa can be any naturally occurring amino acid
MWSFLKSRPDAPQVTDQRQIDASYKYWRIQLMCTMYIGYAAFYFTRKSFNFIMPAMLSDLGLTMSDVGILGTLFYITYGCSKFISGMISDRSNPRYFMGLGLIMTGVLNIFFGLSSSLLMLGTLWILNAFFQGWGWPPCSKILTSWYSRSERGGWWAIWNTSHNVGGALIPLLVGFISLHFSWRYGMIIPGIIGVVLGLLMCWRLRDKPSTLGLPSVGKWRNDAMELVQESEGQGLSNREIIKRYVLTNKYIWLLAVSYVLVYIVRTAINDWGNLYLTQEKGYSLMTANSAISLFEVGGFIGSLVAGWGSDKLFRGNRGPMNLIFAIGIFLSVAALWLMPGVTYLLQACCFFAIGFFIFGPQMLIGMAAAECSHKDAAGAATGFVGLFAYLGAALSGYPIARVMEXWQWNGFFVVISIAACLSALFLLPFLRAQTPALKPAKA

SEQ ID NO: 7155 - DNA, 1185 bp, Serratia marcescens
  misc_feature (1087)..(1087): n is a, c, g or t
atgaatccttcgaccgagtcccctttgctgtcacgcggcatgatcgccgtcatcagcgcgcagttcctctcggcgttcggcgacaatgcgttgctgttcgccacgctggcgttgatcaagcagcagctgtatccggactggagccagccaatcctgcagatggccttcgtcgccacctacatcatcctggcgccgttcgtcggccaggtggccgacagctttgccaaagggcgggtgatgatgttcgccaacgccttaaaattgacgggggcgttggtgatctgttttgggggaaacccgttcctcggctacagcctggtcggggtgggagccgccgcgtattcgccggccaaatacggcattctgggcgagatcaccagcggcgagaagctggtcaaggctaacggcctgatggaggcctcgactatcgccgccattctgaccggttcggtggccggtggcattctggcggactggcatgtggtggcggcgctggcggtctgcgccttggtttacgcgggggcggtggtcgccaacctgtatattccgcgcctcgcggcggcgcgcccgggggcttcctggcgcccgcgggccatgacgaacagcttctttaccgcctgcgtcacgttatggcgcgatgggcagacgcgtttttccttgatcggcaccagcctgttctggggggccggcgtgacgctgcgttttctgctggtgctgtgggtgccggtagcgctcggcatcgccgataacgccacgccgacgctgctgaacgccatggtagccgtcggtatcgtggtgggggccggcgccgccgcacgctttgtcacgctgaagacggtgaagcgctgcatgccggccgggatcctgatcggcgttgcggtcgcggtattcgcgctgcaaaccaccatgctcaatgcctatgtcttgttggcgatcatcggcatgctggggggctttttcgtggtgccgctcaatgcgttgctgcaggagcggggcaagcattcggtcggcgccggcaatgcgatcgcggtgcaaaacctgggtgaaaacgccgccatgttgctgatgctggcgctgtattcgctgntggtgaagctgggcgtgccggtggtgggcgtcggcgtagggtttggcgtggtgtttgcgctggcgattagcgcgctatggtggtcgcagcggcggtga

SEQ ID NO: 7156 - protein, 394 aa, Serratia marcescens
  misc_feature (363)..(363): Xaa can be any naturally occurring amino acid
MNPSTESPLLSRGMIAVISAQFLSAFGDNALLFATLALIKQQLYPDWSQPILQMAFVATYIILAPFVGQVADSFAKGRVMMFANALKLTGALVICFGGNPFLGYSLVGVGAAAYSPAKYGILGEITSGEKLVKANGLMEASTIAAILTGSVAGGILADWHVVAALAVCALVYAGAVVANLYIPRLAAARPGASWRPRAMTNSFFTACVTLWRDGQTRFSLIGTSLFWGAGVTLRFLLVLWVPVALGIADNATPTLLNAMVAVGIVVGAGAAARFVTLKTVKRCMPAGILIGVAVAVFALQTTMLNAYVLLAIIGMLGGFFVVPLNALLQERGKHSVGAGNAIAVQNLGENAAMLLMLALYSLXVKLGVPVVGVGVGFGVVFALAISALWWSQRR

SEQ ID NO: 7157 - DNA, 2157 bp, Serratia marcescens
  misc_feature (611)..(611): n is a, c, g or t
atgatcttttcactgctgcgcgcgctgtttcgcctgctgtttcgggtacgggtcgaaggggacgttcagcacttcgagcggcaaaaactgctgattacgccgaaccacgtctctttcctcgacggcgtgctgctggcgctgttcctgccgattaaaccggtgtttgcggtttacgccagcatcggcgaaagctggtttatgcgctggctgcggccctacattgatttcgtctcgctcgatcccaccaagccgatggccatcaagcaactggtgcgcatggtcgagcaggggcggccgatcgtggtgttccctgaagggcgcatcaccgtgaccggcgcgctgatgaaaatctacgacggcgcggcgtttatcgctgccaaatcgggcgccaccgtggtgccggtgcggatcgacggccccgagttcagcccgttcggccgcatggccggggtgttcaagatccgctggttcccgcaaatcagcatccgcatcttgccaccgaccacgctgccgatgccggaagcgccgcgcgcgcgtgaacgccgggcgctggcgggcgatcggctgatgcagatcatgatgcgggcgcgaatggatacgcgcgaaccgcngacgctgttccatgccttgctggcggcgcagcaccgctacgggcgccgcaagccctgtatcgaagacatcgctttcaaagaagacagttaccagacgctgatcaagaaatcgctgggcgtcagccgcattctgcagcgctttaccgccgaaggggaacacgtcgggctgctgttgccgaacgccaccatcaccgcggcggcgatcttcggcgcttcgctgcgtaaccgcattccggcgatgctcaactacaccgccggcgccaacggcctgaacagcgcgatgctcgccgccggcatcaagaccatcgtcacctcgcgccagtttctggagaagggcaagctgacccacctgccggagcaggtgacgcaggccaactgggtgtatctggaagatctgaaagacaccgttacgctggcggacaagctgtggattttgcggcacttgctgcagccgcagcgcgcggcgttgccgcaacgcccggaggacgcggcgctgatcctgttcacttccggttccgaaggccaccccaagggcgtggtgcattcgcatgccagcctgctggctaacgtagaacaaattcgcaccatcgccgacttcacgccgcgcgaccgtttcatgtcgtcgctgccgctgttccactcgttcggcctgacggtggggctgcttacgccgctgatcaccggcagccgcattttcctctaccccagcccgctgcactatcgcgtggtgccggagctggtgtatgaccgcaactgcacggtgctgttcggcacggcgaccttcctcaacaactatgcgcgcttcgcgcatccgtatgatttcgcccgcctgcgctacgtggtggccggcgcggagaaactggcggacagcaccaaacaaatctaccaggacaaatacggcatccgcattctggaaggctatggcgtgaccgaatgtgcgccggtggtgtccattaacgtgccgttggcgaccaaggtgggcaccgtcggccgcatcatgccgcagatggaggcgcgcctgattgcggtgccgggcatcgataacggcgggcgcctgcagctgaaggggccgaacatcatgaaaggctatctgcgggttgagcgccccggcgagctggaaccgccggcggcggaagatgcgaacggcgtgctgcagccgggctggtacgacaccggcgatatcgtcagcctggatgagcagggctattgcaccattcgcggccgcgtgaaacgcttcgccaagctggcgggcgagatggtgtcgctggagagcgtcgaattgctggcgcaacggctgtcgccggaaaaaatgcatgccgccacggccaaaggcgacagtagcaaaggcgaggcgctggtgctgttcaccaccgatcccgccatcactcgtgaagcattgctgcgggtggcgcgtgagctgggcagcccggagctggcggtgccgcgcgatattcgcctgttgaaaacgctgccggtgctcggcagcggcaaacctgatttcgtcaccctgcgtcatatggccgaacagccggagagtgcccgatga

SEQ ID NO: 7158 - protein, 718 aa, Serratia marcescens
  misc_feature (204)..(204): Xaa can be any naturally occurring amino acid
MIFSLLRALFRLLFRVRVEGDVQHFERQKLLITPNHVSFLDGVLLALFLPIKPVFAVYASIGESWFMRWLRPYIDFVSLDPTKPMAIKQLVRMVEQGRPIVVFPEGRITVTGALMKIYDGAAFIAAKSGATVVPVRIDGPEFSPFGRMAGVFKIRWFPQISIRILPPTTLPMPEAPRARERRALAGDRLMQIMMRARMDTREPXTLFHALLAAQHRYGRRKPCIEDIAFKEDSYQTLIKKSLGVSRILQRFTAEGEHVGLLLPNATITAAAIFGASLRNRIPAMLNYTAGANGLNSAMLAAGIKTIVTSRQFLEKGKLTHLPEQVTQANWVYLEDLKDTVTLADKLWILRHLLQPQRAALPQRPEDAALILFTSGSEGHPKGVVHSHASLLANVEQIRTIADFTPRDRFMSSLPLFHSFGLTVGLLTPLITGSRIFLYPSPLHYRVVPELVYDRNCTVLFGTATFLNNYARFAHPYDFARLRYVVAGAEKLADSTKQIYQDKYGIRILEGYGVTECAPVVSINVPLATKVGTVGRIMPQMEARLIAVPGIDNGGRLQLKGPNIMKGYLRVERPGELEPPAAEDANGVLQPGWYDTGDIVSLDEQGYCTIRGRVKRFAKLAGEMVSLESVELLAQRLSPEKMHAATAKGDSSKGEALVLFTTDPAITREALLRVARELGSPELAVPRDIRLLKTLPVLGSGKPDFVTLRHMAEQPESAR

SEQ ID NO: 7159 - DNA, 1146 bp, Serratia fonticola
  misc_feature (1048)..(1048): n is a, c, g or t
atgaaattacctccatttattgagctgtaccgggcgttgatcgcaacgaagtcgatcagcgccaccgatgccggcctcgatcagagcaatgaggcgttaatcaacttgctggccggctggtttgccgacctgggctttcgcgtcgacgtgcagccggtgccggaatcgcgccacaaattcaacctgctggccagcatcggcgaaggcagcggcggcctgctgctggccggccataccgatacggtgccttacgacgaaggccgctggacgcgcgatcccttcaccctgaccgagcacgacaacaagctctacggcctgggcaccgccgacatgaaaggcttcttcgcctttattctggatgcggtgcgcgacatcgacgcgagcaaattgaccaagccgctgtacattctggctaccgcagatgaagaaacgacgatggccggcgcgcgttatttcgccgcttccaccgccattcgtccggatttcgccatcatcggcgaaccgacctcgctgcagccggtgcgtgcgcacaagggccacatggccaacgccattcgcatcgtcggccagtccggccactccagcgatccggcgcgcggcgtcaacgccatcgatctgatgcacgaatccatcggccgcctgatggagctgcgcaaaaccctgcaggagcgctacaacaatccggcgttcgccgtgccttatcccaccatgaacttcggccatatcagcggcggcgacgcggccaaccgcatctgcgcctgctgcgagctgcacctggatatccgcccgctgcctggcatgacgctagacaacatcaacgagctgatgcatcaggcattggagccggtgagccaacgctggccgggccgcctgaccatcgaagagctgcacgcgtcggtgccgggttacgaatgcccgaccgaccaccgcatggtggcggtgatcgaggagctgctgggcacccgcacgcaggtggtcaactactgcaccgaagcgccgttcgtacagcaggtctgcccgacgttggtgctcgggcccggttccatcnatcaggcccaccagccggacgaatacatcgacaccgcgtttatcgaaccgacgcgcaaactgctgggccagctggtcaatcacttttgccggcagtaa

SEQ ID NO: 7160 - protein, 381 aa, Serratia fonticola
  misc_feature (350)..(350): Xaa can be any naturally occurring amino acid
MKLPPFIELYRALIATKSISATDAGLDQSNEALINLLAGWFADLGFRVDVQPVPESRHKFNLLASIGEGSGGLLLAGHTDTVPYDEGRWTRDPFTLTEHDNKLYGLGTADMKGFFAFILDAVRDIDASKLTKPLYILATADEETTMAGARYFAASTAIRPDFAIIGEPTSLQPVRAHKGHMANAIRIVGQSGHSSDPARGVNAIDLMHESIGRLMELRKTLQERYNNPAFAVPYPTMNFGHISGGDAANRICACCELHLDIRPLPGMTLDNINELMHQALEPVSQRWPGRLTIEELHASVPGYECPTDHRMVAVIEELLGTRTQVVNYCTEAPFVQQVCPTLVLGPGSIXQAHQPDEYIDTAFIEPTRKLLGQLVNHFCRQ

SEQ ID NO: 7161 - DNA, 1941 bp, Serratia marcescens
  misc_feature (254)..(254): n is a, c, g or t
atgggcaagatcaggctaaccatggcgcaggcgctcgtcagattcctcgataaccagtatctgctggccgacggtgtggaaaccaaattcgtcgcgggcatttttgcgattttcggccacggcaacgtgctggggctggggcaagcgctggagcaggatagcggcgatctgcgggtgcatcagggccgcaacgagcaggggatggcccatgcggcgatcggcttcgccaaacagaagctgcgccggcagatctncgcctgcacctcatcggtcggccccggcgccgccaatatgatcaccgccgcggccaccgccaccgccaaccgcattcctttattactgctgccgggcgacgtttacgcatcccgccagccggatccggtgctgcagcaaatcgagcagtcttacgatctcagcatcagcaccaacgacgcgttccgcgcggtgagcaaatactgggaccgcatcgtgcggccggaacagctgatgagcgcctgcatcaacgcgatgcgcgtgctgaccgatccggcggaaaccggcgcggtgacgctgtgtctgccgcaggacgtgcagggtgaagcctacgactatcccgactatttcttccaaaaacgcgtgcatcggctcgatcgccgcccggcgaccgacggcatgttggcggacgcgttggcgctgctggcggccaaacgcaaaccgctgctggtgtgcggcggcggcgtgaaatactcgcaggccgggcgggcgctgcgcgaattcgccgagcgcttcggcattccgttcgccgaaacccaggccggcaaaggcacggtgccgagcgaccatgaattcaacctcggcggcattggcgaaaccggctgcctggcggccaatacgctggctcgtcaggccgatctggtgatcggcgtcggcacccgttacaccgatttcaccacctcgtccaaatggctgttccaaaatccggacgtcagcttcctcaatatcaacgtcagcgcctttgacgccggcaagctcgacggcgtgcaggtactggcggacgcccgcgaggccctgagcgaactgggcgcgctgctggcgcaggccgagtaccgcgccggctggggcgacgccatcgccgcggcgcgcagcgcccagcgtgaagagaccgagcgcgtttacgcggtggaatacggcggcgcaggctttgtgccggagatagacgatcacctcgatcgcgagcgggtgttcgccgaatttatcgcccagaccgattccgcgctgacccagagccgggtgctgggggtgctgaaccgcgagctgccggcggacagcgtgatcgtcgccgccgccggcagcctgccgggcgatttgcagcgggtgtggcacaaccgcggcgagcacggttatcacgtggagtacggttactcctgcatggggtatgaggtgaacgccgcattgggggtcaagctggccgagccgcagcgcgaggtgtacgcgatggtgggcgacggcgccttcatgatgctgcattccgaactggtcacttcgattcaggaaggttgcaagatcaacgtgatgctgttcgacaacatgaccaacggctgcatcaacaacctgcagatggaacacggcatggacagctacaccaccgaattccgcttccgtaatccacagggcggcaagctcgacggcaaactggtgccggtcgatttcgccatgctggcggcggcttacggttgcaaaacctatcgcgtcaccaccgagcagcagctgctcgatgcgctggccgacgcccgcaggcagaccgtgtccacgctgctggacatcaaggtgctgccgaagaccatggtgcacaagtatctcagctggtggcgcgtgggcggcgctcaggtggccgacagcgagaaaatcgtcgcagtggcgcgcaagctgcaggaaaacatcgataaggcgcgcgattactga

SEQ ID NO: 7162 - protein, 646 aa, Serratia marcescens
  misc_feature (85)..(85): Xaa can be any naturally occurring amino acid
MGKIRLTMAQALVRFLDNQYLLADGVETKFVAGIFAIFGHGNVLGLGQALEQDSGDLRVHQGRNEQGMAHAAIGFAKQKLRRQIXACTSSVGPGAANMITAAATATANRIPLLLLPGDVYASRQPDPVLQQIEQSYDLSISTNDAFRAVSKYWDRIVRPEQLMSACINAMRVLTDPAETGAVTLCLPQDVQGEAYDYPDYFFQKRVHRLDRRPATDGMLADALALLAAKRKPLLVCGGGVKYSQAGRALREFAERFGIPFAETQAGKGTVPSDHEFNLGGIGETGCLAANTLARQADLVIGVGTRYTDFTTSSKWLFQNPDVSFLNINVSAFDAGKLDGVQVLADAREALSELGALLAQAEYRAGWGDAIAAARSAQREETERVYAVEYGGAGFVPEIDDHLDRERVFAEFIAQTDSALTQSRVLGVLNRELPADSVIVAAAGSLPGDLQRVWHNRGEHGYHVEYGYSCMGYEVNAALGVKLAEPQREVYAMVGDGAFMMLHSELVTSIQEGCKINVMLFDNMTNGCINNLQMEHGMDSYTTEFRFRNPQGGKLDGKLVPVDFAMLAAAYGCKTYRVTTEQQLLDALADARRQTVSTLLDIKVLPKTMVHKYLSWWRVGGAQVADSEKIVAVARKLQENIDKARDY

SEQ ID NO: 7163 - DNA, 1506 bp, Serratia marcescens
  misc_feature (1023)..(1023): n is a, c, g or t
atgaaaaccgtgggtaactttattgacgggcaggtgtgcctgagcagcagcaatcaaaccgtcgacgtgcacaacccggccagcgggcaggttgagcggcgcgtcacgcagagcaccgccgccgaagtcaagcaggccatcgacgtggcccatcgggcgtttgccgattggtcgcgcaccacgccgctgcgccgcgcgcgcatcatgttcaatttcaaggcgctgctggaacagcaccgcgacgagctggccgagcttatcgtcagcgagcacggcaaggtgtactcggatgcgctgggcgaactgacgcgcggcatggaagtggtcgaattcgcctgcggcatcccgcatctgatcaagggcgagtattcgccggacgtcggcagcggcgtcgacagcttctcgctgatgcagccgctgggcgtggtggcgggcattaccccgttcaacttcccggcgatggtgccgatgtggatgttccctatcgcgctggcctgcggcaacaccttcatcctcaagccgccggcgctggtgccttccgcctcggtgcgcctggcggaactgctgaaagaagccggcctgccggacggcgtgttcaacgtggtgcactgcgccaatgaagacgcggcgcagctgtgcaccgatccgcgcattcaagcggtgagcttcgtcggctcctccaccgtggcggaacatatctataccaccgccagcgcgcacggcaagcgggtgcaggccttcggtgcggcgaagaaccaggcgatcgtcatgccggacgccgatctggacgccacggtcaacgcgctgatgggcggcgctttcggctccgccggcgagcgctgcatggcgctgccgatcgccgtggtggtcggtgacgacaccgccgataaactgatcgccaaactgaagccgctgatcgcgcagctgcgcgtcgggccgggcttgcagcagggcggagaagagaatgaaatggggccgctggtgtcgtccgcccaccagaaaaaggtgctgggttacatcganctgggcgtggaagaaggcgccaccctggtggccgacggccgcaattatcaggtgccgggctatcctgaaggctactacgtcggcggcacgctgttcgaccatgtgaagccgaacatgcgcatctaccgtgaagagatcttcgggccggtgctgggcatcgtgcgggtgccggattaccgcaccgccatcgacacggtgaacggccacgagtttggcaacggcagcgccatctttaccggcagcggccactacgcgcgccagttcgtgcaagaagtgcaggccgggatggtcggcgtcaacgtgccggtgccggtgccgatggcgttccacagcttcggcggctggaagcgctcggtgttcggcgcgcttaacgtgcacggcaccgacggcgtgcgcttctacacgcgcatgaagaccgccaccgcgcgctggccggccgggcagcagacggtgtccgaattcagcatgccgacgctgggttaa

SEQ ID NO: 7164 - protein, 501 aa, Serratia marcescens
  misc_feature (341)..(341): Xaa can be any naturally occurring amino acid
MKTVGNFIDGQVCLSSSNQTVDVHNPASGQVERRVTQSTAAEVKQAIDVAHRAFADWSRTTPLRRARIMFNFKALLEQHRDELAELIVSEHGKVYSDALGELTRGMEVVEFACGIPHLIKGEYSPDVGSGVDSFSLMQPLGVVAGITPFNFPAMVPMWMFPIALACGNTFILKPPALVPSASVRLAELLKEAGLPDGVFNVVHCANEDAAQLCTDPRIQAVSFVGSSTVAEHIYTTASAHGKRVQAFGAAKNQAIVMPDADLDATVNALMGGAFGSAGERCMALPIAVVVGDDTADKLIAKLKPLIAQLRVGPGLQQGGEENEMGPLVSSAHQKKVLGYIXLGVEEGATLVADGRNYQVPGYPEGYYVGGTLFDHVKPNMRIYREEIFGPVLGIVRVPDYRTAIDTVNGHEFGNGSAIFTGSGHYARQFVQEVQAGMVGVNVPVPVPMAFHSFGGWKRSVFGALNVHGTDGVRFYTRMKTATARWPAGQQTVSEFSMPTLG

SEQ ID NO: 7165 - DNA, 918 bp, Serratia marcescens
  misc_feature (44)..(44): n is a, c, g or t
atgacggacagtcagtctgaaaaaactctcgttgttccccctgngcatcccgtcgccgggcattcgccccagggctggatgaacggcttcctcggcatgattattttcagcggctcgctgcccgccacgcgggtggcggtgctggagctcgatccgctgtttctgacggcggtcagggcggcgattgctgccttgctggcgctgtgtgcgctgctgatcacccgccaggcgcggccgacgcgggccgatttgccgccgctgctgtttgtggcgcttggcgtggtcatcggttttccgctgctgacggcgctggcgctgcagcacaccacctcggcgcattcgctggtgtatatcggcctgctgccgttggcgaccgccggttttggcgttttgcgcggcggagagcggcccaagcccgctttttgggctttttcaggcgtcggcgccgtgctggtgggcgctttcgcgctaagccaggggagcggcggagcctggcaaggggatgcgctgatgatcggtgcggtgctgctgtgcggcctgggttatgccgaaggggcggtgctgtcgcgccggatcggcggctggcaggtgatctcctgggcgctggtggcggcgttgccgttgacgctggcggccacttggctggcggcgccggccggttggcctgccgtcagcggcgccgcctggctgtcgctggtttacgtctcggtgttcagcatgtggattgggtttattttctggtatcgcggcctggcgcagggcggcatcgccgccgtcgggcagctgcagctgctgcagccgttcttcggcctggcgctggcgggctggctgctgcaggaaaccgtccagccgatgatgatcgccgtgatggccggcgtggtggtttgcgtgttcggcgccaagcgcttttcccgctag

SEQ ID NO: 7166 - protein, 305 aa, Serratia marcescens
  misc_feature (15)..(15): Xaa can be any naturally occurring amino acid
MTDSQSEKTLVVPPXHPVAGHSPQGWMNGFLGMIIFSGSLPATRVAVLELDPLFLTAVRAAIAALLALCALLITRQARPTRADLPPLLFVALGVVIGFPLLTALALQHTTSAHSLVYIGLLPLATAGFGVLRGGERPKPAFWAFSGVGAVLVGAFALSQGSGGAWQGDALMIGAVLLCGLGYAEGAVLSRRIGGWQVISWALVAALPLTLAATWLAAPAGWPAVSGAAWLSLVYVSVFSMWIGFIFWYRGLAQGGIAAVGQLQLLQPFFGLALAGWLLQETVQPMMIAVMAGVVVCVFGAKRFSR

SEQ ID NO: 7167 - DNA, 2949 bp, Serratia marcescens
  misc_feature (1465)..(1465): n is a, c, g or t
atgatgctggcaccccttacggactacaaacacggcattacgctgattcaagacagcggcattcagtttctggactttgccctgacgccgctgctggacgccgagtttcccggcaaattcgtgcgcaagaccgccagcggcccgctgctgcgcctgcaatgggaggccgagagcggcaaataccagctgccggccgtgggcgaccaggccgccgaagtggtgcggccggagttcagctatccgctgcagcagtcgctgcacctgctggataagctctggttgccgctgccctgcttgcgccacaccccggcgggcctgttcttgtcgggcccggacaactgggcgcgcctgcaggtggtgcagttggatgaaccggatcaggacggcaacctgctgcgcgtggtgctggccttcgacacccgcgccgcggcgcccggccaggaggcgctggcgccgggcgaaagcgatctcggcaccgatctccgtttcgcgctggcgcatcgcaaccacgagctgggcgagttcctcgatctgacctgggtggacggctggctgcgcgaggcgttcagccagcgcgccgccgagcgggagcagcgtgccgaagtggagatcaacgccgggctgaaaaccttcgagtatcaggcgcactacctcaatctgttgcacatgcttggccatcagctggcggtgccgcagataaagatggtggcggcgacgctgcagcaaccggcgatcgacgtcgatctggtgctggacgtcggcaactcccacacctgcggcgtgctggtcgaggatcatccggaggagagcaacggcctgaagcaaacctacgagctgcagctgcgttcgctgtccgaaccgcaccgcgtctacaacgaactgttcgagagccgggtggagttttctcgggccggcttcggcaagccgcatctgtctttccagagcgggcgcgacgacgccttccagtggccgtccatcacccgcgtcggccgcgaagccgcgcaactggcgcagcggcgaacgggccatgaaggcactaccggcatttccagcccgcgccgctacctgtgggacgaggagcgctatgcgcccggctggcgcttcaacgagcagcacgagccgatggccgccgccgcgccgttgaccaccctgatcaacgacgaaggcgtgccgctgtccgccctgccgacggcgcaacggctgccggtgttcgccgcccattacagccgcagcgcggtgatgacgctgatgctgagcgagctgctggcgcaggcgctgatgcagatcaacagcatcgcccagcgcagccgcatgccgaacgccgccgcgccgcgccgtttgcgcgccatcattctgacgctgccttcggcgatgccgaaaccggagcgcgagatcttccgccgccgcatgcaggaggcgatcgggctggtgtggaaggccctcgactggcacccgcaggatgcgncgttcgacggcgcgcacgcccgcttcccggcgccgcaggtgcagatggagtgggacgaggccacctgcggccagatggtctatctgtacaatgaaacccaggtgaacttcgccggccgcactgacgcctttttcgccgccatggcccggcccgaccggccgctggcgccggatgagcaggcgggcaaaacgctgcgcatcgcctccatcgacatcggcggcggcaccaccgatctggcgatcacgcactattcgctcgacgacggcgtgggcaacaacatcaaaatcaacccgcgcctgctgttccgcgagggctttaaggtcgccggcgacgatatcctgctggacgccatccagcagtttatcctgcccgccgtgcagcaggcgttcgaagccgccggcgtaagcgccgccccggcgttaatggacaggctattcggcaacgaagggcgtatggacgggctttccaccctgcgtcagcaggccgcgctgcagattttcatgcccgccgggcgcgcgctgctcggcgcctatgaagaatacgacccgctggacagccgggcggaaatcgccgccagcctgggcgatctgctgccgcagccgccgacgccgcaggtgctggcgtttatcaacggcgaggtgcagcgcgaagccgacagcgacgccttcgagattctgcacaccccgctggtgatccgcctggccgatctgcacgccgccttcttgtccgatcgcatcggcatcggccgctgcctgcgcctgctggccgaggtggtggcgctgtatacctgcgacgtgctgctgttgaccggccgcccggcgcgtttccccggcgtgcaggcgctgctgcgccacctgcagccgctgcccgccagccgcattctgccgctcgagggctaccacacccgcagctggtacccgttcaacaaacgcggccgcatcgacaacccgaaatccaccgccgcggtgggcgccatgttgtgcctgctggcgatcgacctgcggctggagagcttttacttcaacgtcggcgatttccagccttactccaccattcgccacctgggcatgctggacggcaacaacatgctggcggacgataacgtctattaccgcgacatcgatctggatcgcgccgacttcgcgctcgaccccgccggcagcttccagctgcgcggcccgctgcgcctgggcttccgccaactggacaacgaacgctggccggcctcgccgctctatacgctgaccatcaatgacgcccagctggcgcgcaaactggccggcgacgcggtgatcaccctgcgactggccattaccgccagtgccgaacagggcgcggaaagcgtcaggatcgcgcaggcgttgctggccgacggcagccccgtcccggcgcaccatctgcaactgaaactcaataccctggctgccagcgcctccggcgcgacccactactggatagacagcgggagcatttacccacgatga

SEQ ID NO: 7168 - protein, 982 aa, Serratia marcescens
  misc_feature (489)..(489): Xaa can be any naturally occurring amino acid
MMLAPLTDYKHGITLIQDSGIQFLDFALTPLLDAEFPGKFVRKTASGPLLRLQWEAESGKYQLPAVGDQAAEVVRPEFSYPLQQSLHLLDKLWLPLPCLRHTPAGLFLSGPDNWARLQVVQLDEPDQDGNLLRVVLAFDTRAAAPGQEALAPGESDLGTDLRFALAHRNHELGEFLDLTWVDGWLREAFSQRAAEREQRAEVEINAGLKTFEYQAHYLNLLHMLGHQLAVPQIKMVAATLQQPAIDVDLVLDVGNSHTCGVLVEDHPEESNGLKQTYELQLRSLSEPHRVYNELFESRVEFSRAGFGKPHLSFQSGRDDAFQWPSITRVGREAAQLAQRRTGHEGTTGISSPRRYLWDEERYAPGWRFNEQHEPMAAAAPLTTLINDEGVPLSALPTAQRLPVFAAHYSRSAVMTLMLSELLAQALMQINSIAQRSRMPNAAAPRRLRAIILTLPSAMPKPEREIFRRRMQEAIGLVWKALDWHPQDAXFDGAHARFPAPQVQMEWDEATCGQMVYLYNETQVNFAGRTDAFFAAMARPDRPLAPDEQAGKTLRIASIDIGGGTTDLAITHYSLDDGVGNNIKINPRLLFREGFKVAGDDILLDAIQQFILPAVQQAFEAAGVSAAPALMDRLFGNEGRMDGLSTLRQQAALQIFMPAGRALLGAYEEYDPLDSRAEIAASLGDLLPQPPTPQVLAFINGEVQREADSDAFEILHTPLVIRLADLHAAFLSDRIGIGRCLRLLAEVVALYTCDVLLLTGRPARFPGVQALLRHLQPLPASRILPLEGYHTRSWYPFNKRGRIDNPKSTAAVGAMLCLLAIDLRLESFYFNVGDFQPYSTIRHLGMLDGNNMLADDNVYYRDIDLDRADFALDPAGSFQLRGPLRLGFRQLDNERWPASPLYTLTINDAQLARKLAGDAVITLRLAITASAEQGAESVRIAQALLADGSPVPAHHLQLKLNTLAASASGATHYWIDSGSIYPR

SEQ ID NO: 7169 - DNA, 1200 bp, Serratia rubidaea
  misc_feature (425)..(425): n is a, c, g or t
gtggaacagtttgatgtcgtagtgattggggcgggcgccgccggcatgttttgcgccgcgcaggcggggcaactcggttgccgcgtgttgctgctcgacaacggcaaaaaaccgggccgcaagatcctgatgtccggcggcgggcgctgcaactttaccaacatgtacgccgaaccggcggcctacctgtcgaacaacccgcacttttgcaagtcggcgctggcgcgctacacccagtgggacttcatcgatctgatcaaccgctacggcatcgcctaccatgaaaaaacgctggggcagctgttctgcgacgactcggcgcagcaggtggtggatctgctggtcaaagagtgcgagctgggccaggtgacggtgcgcctgcgcagcgaagtgctgggcgtggagaaaaccgaacatggctacgngctggcgctgaatggtgaaaaagtgagtgctcgctcacttgtggtggccagcggcggtttgtccatgccggggctgggcgcttcgccgttcggttacaagctggcggagcagttcggtctcagggtgctgccgacgcgtgccgggctggtgccttttaccctgcataagccgctgctggagcatgtgcagacgctgtccggcgtctcggtgccggcggtgatcaccgccgagaacggcgtcagcttccgtgaaagcatcctgtttacccatcgcggcctgtccggcccggcggtgctgcagctgtccagctactggcaaccgggtgagtatgtgagcattaacttacttcctgagctggatttggcggccttcctggatgatcaacgccgccagcacccgaaccaaagcctgaaaaacaccctggcgctgcaattgccgaagcggttggtggagtgcttgcaaaccctgggacaactgccggaggccacgctgaagcagctgaatgcgccgcagcagacggcgctggtggagctgttgcagaactggcgcgtgcagccgaacggcaccgaaggttaccgcacggcggaagtgacgctcggcggcgtcgacaccaacgaactttcctccaagacgatggaagcccacaaggcgccggggctctattttatcggcgaagtggtggacgtgaccgggtggttgggcggctacaacttccagtgggcgtggagctcggcctgggcctgcgcccaggcgttggcggcgcaggagcgttaa

SEQ ID NO: 7170 - protein, 399 aa, Serratia rubidaea
  misc_feature (142)..(142): Xaa can be any naturally occurring amino acid
MEQFDVVVIGAGAAGMFCAAQAGQLGCRVLLLDNGKKPGRKILMSGGGRCNFTNMYAEPAAYLSNNPHFCKSALARYTQWDFIDLINRYGIAYHEKTLGQLFCDDSAQQVVDLLVKECELGQVTVRLRSEVLGVEKTEHGYXLALNGEKVSARSLVVASGGLSMPGLGASPFGYKLAEQFGLRVLPTRAGLVPFTLHKPLLEHVQTLSGVSVPAVITAENGVSFRESILFTHRGLSGPAVLQLSSYWQPGEYVSINLLPELDLAAFLDDQRRQHPNQSLKNTLALQLPKRLVECLQTLGQLPEATLKQLNAPQQTALVELLQNWRVQPNGTEGYRTAEVTLGGVDTNELSSKTMEAHKAPGLYFIGEVVDVTGWLGGYNFQWAWSSAWACAQALAAQER

SEQ ID NO: 7171 - DNA, 1359 bp, Serratia marcescens
  misc_feature (325)..(325): n is a, c, g or t
gtgaagcgtctcagcctgcggctgcgtctgatcctgatcttcagtctgttggcgctgatgacctggtgcaccgccagcgtggtggcctgggtgatgtcgcgcaacaccatcaatgaagtgttcgacacccagcagatgctgtttgccaaacggctggcgaccgccaacctcggcgatctgctggccgatgaaagcgcgcgcagcctgccgaaaaccaagaagctggtgcatcatggcaagcgtggcgatcaggacgacgacgcgctggcgttcgccatcttcgatcgccaaggcaagatgctgctcaacgacggcgagaacggcnccgatttcctgtttgacggggagcgtgaaggttttaccgacggcgagcgcaaaggcgatgacgacagctggcgcctgctgtggctgaccagcccggatgggcgctatcgcatcgtggtcggccaggagtgggattaccggcgcgatatggcgctgggcatggtgaccggccagctggtgccctggctggcgacgctgccggtgctgatgctgctgatcgcgctgatggtcgggcgcgagctgcggccgctgcgcgcggtggcggccggtttgcgccggcgcgcgcccgatgacgcgacgccgttggacgcgcgccaggtgccgaccgaggtgcgtccgctggtggatgcgctcaatgcgctgttcgctcgcatcaacgcgttgctggtgcgggagcggcgtttcacctccgatgccgcgcacgagttgcgcagcccgctggcggcgctgcgggtgcagaccgaagtggttcaactggcgggggacgatgcgccgatgcgcgagcacgcgctggacaatcttacggtcggcatcgatcgcgccacccggctggtggatcagctgctgacgctgtcgcggctggattcgctgttggatctggccgaactggcgccgatcgactggaacgaactggtgacgatgaccctggcggagcaggatcggcaggcccatgcggcgggcgtgacgctgcgctatgaacatcagggaacgccgccgccgcgtcagggggaaaccttgctgctgtcgctgctattgcgcaacttgctggataacgcggtgcgctataccccgcagggcggcgtcgtcaccgtgacgctgagcgaacgctcgctgacggtggaggacgacggtccgggggtcaccacggagcatctggcgcggctgggagaacgtttctatcgcccgccggggcaggagcaaaccggcagcgggctgggcctctcgatcgtgcagcgtatcgccggattgcatggtttacagatcggctttgccaatcgcccgccgggcgggttcgttgcgcggctgacgctgtaa

SEQ ID NO: 7172 - protein, 452 aa, Serratia marcescens
  misc_feature (109)..(109): Xaa can be any naturally occurring amino acid
MKRLSLRLRLILIFSLLALMTWCTASVVAWVMSRNTINEVFDTQQMLFAKRLATANLGDLLADESARSLPKTKKLVHHGKRGDQDDDALAFAIFDRQGKMLLNDGENGXDFLFDGEREGFTDGERKGDDDSWRLLWLTSPDGRYRIVVGQEWDYRRDMALGMVTGQLVPWLATLPVLMLLIALMVGRELRPLRAVAAGLRRRAPDDATPLDARQVPTEVRPLVDALNALFARINALLVRERRFTSDAAHELRSPLAALRVQTEVVQLAGDDAPMREHALDNLTVGIDRATRLVDQLLTLSRLDSLLDLAELAPIDWNELVTMTLAEQDRQAHAAGVTLRYEHQGTPPPRQGETLLLSLLLRNLLDNAVRYTPQGGVVTVTLSERSLTVEDDGPGVTTEHLARLGERFYRPPGQEQTGSGLGLSIVQRIAGLHGLQIGFANRPPGGFVARLTL

SEQ ID NO: 7173 - DNA, 2289 bp, Enterobacter cloacae
  misc_feature (956)..(956): n is a, c, g or t
atggggaatatgacgatggcaattttgaatcacacactgggttttcctcgcgttgggctacgacgtgagctgaaaaaagctcaggaaagctactgggccggcaactcaacgcaggaagagctgttggcggttggccgcgagctgcgcgctcgtcattggcagcagcaacagcaggccggggtggatttggtgccggtcggcgatttcgcctggtacgatcatgtgttgaccaccagcctgctgctgggcaacgtgccggcgcgccatcagaatgcggatggcacgatcgatctggacacgctgtttcgcatcggccgtggccgcgcaccgaccggcgagccggcggccgcggcggaaatgaccaaatggttcaacaccaactatcactacatggtgcccgaattccagcaaggccagcagttcaagctgggctggactcagttgctggacgaagtggacgaagcgctggcgctcggccatcgcatcaagccggtgctgctgggcccggtgacttatctgtggctgggtaaggtgaagggcgaggcgttcgaccgcctgtcgctgctgaaagacatcctgccggtttaccaacaggtgctggccgagctggcgaaacgcggcgtcgagtgggtgcaaattgatgagcctgcgctggtgctggaactgccgcaagcctgtctggatgcgttcaaaccggcttacgacgcgctgcaggggcaggtgaagctgctgctgaccacgtatttcgacagtgtcggccacaacctcgataccgtccgcacgctgccggtgcaggggctgcatgtcgatctggtcgccggccatgacgatatcgccgcgctgagcgccgcattgccgcaagactggctgctgtcgctgggggtaatcaacggccgcaacgtctggcgcgccgatctgagccgctggttcgaacgtctgcagccgctggtgggcanccgtccgctgtggatcggcagctcctgttcactgctgcacagcccgatcgatctgagcgtggaaagccgtctggacgaagaagtgaaaagctggttcgccttcgccctgcaaaaatgcgccgagctggcgctgttgagctcggcgctgaacgcgcctgacgcgacgaaacgggccgaactggacgcctacagcgcgccgatccgcgcccgctgtcagtcgagccgcgtgcacaacccacaggttgagcgccgcctggcggcgatcaccgcgcaggacagcgaacgccacagcgcttacgccgagcgcgccagggcgcagcgcgaacgtttcaacctgccggcttggccgaccaccaccatcggttcgttcccgcagaccaccgagatccgcggcctgcgtctggacttcaaacagggccgtttggacggcaacaactaccgcaccagcatcggtgagcacatcaaacaggcgatcgtcgagcaggagcgtctcgggctggacgtgctggtgcacggtgaagccgagcgcaacgacatggtggaatatttcggcgagaacctggacggcttcgtgtttacccaaaacggctgggtgcagagctacggctcccgctgcgtgaagccgccggtgatcatcggtgacgtcagccgcccggaagccatcaccgtcgaatgggccaaattcgcccagtcgctgaccgacaagccggtgaaaggcatgttgaccgggccggtgaccatcctgtgctggtcgttcccgcgtgaagacgtgacccgcgaagtgattgccaagcagattgcgctggcgctgcgcgatgaggtggaagatctggaaaaagccggcatcggcatcatccagatcgacgaacccgcgctgcgcgaagggctgccgctgcgccaatccgactgggcggcgtatctgaactgggcggtggacgccttcaaactgaacgccgccgtggcgcgggacgacacccagatccacacccacatgtgttactgcgagttcaacgacatcatggactccatcgccgcgctggacgccgacgtgatcaccatcgagacctcgcgttccgatatggatctgctggaagccttcaaagagttcgaatacccgaacgaaatcgggccgggcgtctacgatatccactcgccaaacgtgccgagcgtggaatggattgaagcgctgctgcgtaaagcggcgcagaacatcccggcggaacgcctgtgggttaacccggattgcggcctgaaaacccgcggctggccggaaacccggcagtcgctggccaacatggtattggcggcacagcgcctgcgcgagcaagcgtga

SEQ ID NO: 7174 - protein, 762 aa, Enterobacter cloacae
  misc_feature (319)..(319): Xaa can be any naturally occurring amino acid
MGNMTMAILNHTLGFPRVGLRRELKKAQESYWAGNSTQEELLAVGRELRARHWQQQQQAGVDLVPVGDFAWYDHVLTTSLLLGNVPARHQNADGTIDLDTLFRIGRGRAPTGEPAAAAEMTKWFNTNYHYMVPEFQQGQQFKLGWTQLLDEVDEALALGHRIKPVLLGPVTYLWLGKVKGEAFDRLSLLKDILPVYQQVLAELAKRGVEWVQIDEPALVLELPQACLDAFKPAYDALQGQVKLLLTTYFDSVGHNLDTVRTLPVQGLHVDLVAGHDDIAALSAALPQDWLLSLGVINGRNVWRADLSRWFERLQPLVGXRPLWIGSSCSLLHSPIDLSVESRLDEEVKSWFAFALQKCAELALLSSALNAPDATKRAELDAYSAPIRARCQSSRVHNPQVERRLAAITAQDSERHSAYAERARAQRERFNLPAWPTTTIGSFPQTTEIRGLRLDFKQGRLDGNNYRTSIGEHIKQAIVEQERLGLDVLVHGEAERNDMVEYFGENLDGFVFTQNGWVQSYGSRCVKPPVIIGDVSRPEAITVEWAKFAQSLTDKPVKGMLTGPVTILCWSFPREDVTREVIAKQIALALRDEVEDLEKAGIGIIQIDEPALREGLPLRQSDWAAYLNWAVDAFKLNAAVARDDTQIHTHMCYCEFNDIMDSIAALDADVITIETSRSDMDLLEAFKEFEYPNEIGPGVYDIHSPNVPSVEWIEALLRKAAQNIPAERLWVNPDCGLKTRGWPETRQSLANMVLAAQRLREQA

SEQ ID NO: 7175 - DNA, 1452 bp, Serratia marcescens
  misc_feature (1385)..(1385): n is a, c, g or t
atgaaaacaccctcacagccgcgcgcaatctactatgtcgtagccatacaaatttgggaatatttcagcttttacggcatgcgtgcgttactgattctctatctgacccaccaactcggctataccgacagccacgccatcgatctctacagcgcttacgcttcgttagtttacgtcactcctattttgggcggctggctcgccgaccgcctgctgggcaatcgcgtcgcggtgattgccggtgcggcgctgatgacgctggggcatatcgtgctcggcctgagtgcggtctccgcccagtcgctctatctggctctggccatcatcatctgcggctacggcctgttcaaatctaatatcagctgcctgctgggcgagctgtatccggcgcaggactcgcgccgcgaagggggcttctcgctgctgtacgccgccggcaacgtcggttccattttggcgccgatcgcctgcgggttggcggccgagcgctatggctggcacgtcggctttgcgttggccgggatcggcatgttcgccggcctggcgatcttcctgctcggcgggcgccacttccgccatacccgcggcgtgaatgcaccgctgatgcgcgccaaaagcctgggtttgccgcactggggttggctgttggcggcgctgctggcatcgccgctgttcttcacgctgctgtttgtgcacgactgggccggctatttgctcgggctggtatgcgtggcggcggtggtgctggtggcgcgcattatgctgcgtgcggacgccggccagcgccgggggctgtggcagatcgttgtgctgatgctgctgggcacgttgttctgggctttcgcccagcagggcggcagctccatcagcctgtttatcgatcacttcgtcgatcggcgctggttcggctggacggtgccgaccgcgctgttccagtcggttaacgcctgtgcggtgatgctgggcggcgtggcgctggcatggctggcgagcggcgacggtacgggcgatcgcacgttgcgcatctggtgcaagttcgccttcggtctgctgttgatcggcgtcggctttacgctgatggcgctcaatacgcggctgcacgggccgggatcgatggggctgatgatcgccggcctggctgtgatgggcttcgccgaactgtttatcgatccggtggcgatggcgcagatcacccggctgaatatccccggcgccaccggcgtgctgaccggtatctatatgctggcgaccggctcgatcgccaactacctggcgggcattattgccaatcagaccgccgaggatcacatcgagggtgcggcgatgcaggcgtatggccgcattttcgctcagatcggctggggagcggccggatgcgcgctggnggtgatcgcggtgctgggcggctggtggttgctggcgcggcgccaggcccggacggttaatgcttga

SEQ ID NO: 7176 - protein, 483 aa, Serratia marcescens
  misc_feature (462)..(462): Xaa can be any naturally occurring amino acid
MKTPSQPRAIYYVVAIQIWEYFSFYGMRALLILYLTHQLGYTDSHAIDLYSAYASLVYVTPILGGWLADRLLGNRVAVIAGAALMTLGHIVLGLSAVSAQSLYLALAIIICGYGLFKSNISCLLGELYPAQDSRREGGFSLLYAAGNVGSILAPIACGLAAERYGWHVGFALAGIGMFAGLAIFLLGGRHFRHTRGVNAPLMRAKSLGLPHWGWLLAALLASPLFFTLLFVHDWAGYLLGLVCVAAVVLVARIMLRADAGQRRGLWQIVVLMLLGTLFWAFAQQGGSSISLFIDHFVDRRWFGWTVPTALFQSVNACAVMLGGVALAWLASGDGTGDRTLRIWCKFAFGLLLIGVGFTLMALNTRLHGPGSMGLMIAGLAVMGFAELFIDPVAMAQITRLNIPGATGVLTGIYMLATGSIANYLAGIIANQTAEDHIEGAAMQAYGRIFAQIGWGAAGCALXVIAVLGGWWLLARRQARTVNA

SEQ ID NO: 7177 - DNA, 627 bp, Shigella boydii
  misc_feature (355)..(355): n is a, c, g or t
atgaaaactatcgtttataacgtcaatgacgacactctggatggcaacgacaccattgtttccgtggcgtcatgcaccactaactgccttgcgccgatggccaaagccttgcatgacagtttcgggatagaagtcggcacgatgacgaccattcatgcctatactggcacccagtcactggtggatggcccacgtggtaaagatttacgtgcttcacgcgcagcggcagaaaatatcattccccacactacgggggcggcaaaagccattggtctggagatcccggaactgagcggcaaactgaaaggtcatgcgcaacgcgtgccggtgaaaacaggttcggtcactgaactgntatcgattctcggaaaaaaagtgactgccgaagaggtgaataacgcacttaaacaagcaaccaccaataacgagtcatttggttataccgatgaagaaatagtctcttccgatatcattggcagccatttcggttcggtgtttgatgctacgcaaacggaaattaccgccgtgggcgatttacaactggtgaaaacggtcgcctggtacgataacgaatatggcttcgtcacgcagcttattcgcaccctcgaaaaattcgctaaactctga

SEQ ID NO: 7178 - protein, 208 aa, Shigella boydii
  misc_feature (119)..(119): Xaa can be any naturally occurring amino acid
MKTIVYNVNDDTLDGNDTIVSVASCTTNCLAPMAKALHDSFGIEVGTMTTIHAYTGTQSLVDGPRGKDLRASRAAAENIIPHTTGAAKAIGLEIPELSGKLKGHAQRVPVKTGSVTELXSILGKKVTAEEVNNALKQATTNNESFGYTDEEIVSSDIIGSHFGSVFDATQTEITAVGDLQLVKTVAWYDNEYGFVTQLIRTLEKFAKL

SEQ ID NO: 7179 - DNA, 1386 bp, Shigella flexneri
  misc_feature (1211)..(1211): n is a, c, g or t
atgctgacattcattgaactccttattggggttgtggttattgtgggtgtggctcgctacatcattaaagggtattccgccactggtgtgttatttgtcggtggcctgttattgctgattatcagtgccattatggggcacaaagtgttaccgtccagccaggcttcaacaggctacagcgccacggatatcgttgaatacgttaaaatattactaatgagccgcggcggcgacctcggcatgatgattatgatgctgtgtggctttgccgcttacatgacccatatcggcgcgaatgatatggtggtcaagctggcgtcaaaaccattgcagtatattaactccccttacctgctgatgattgccgcctattttgttgcttgtctgatgtcactggccgtctcttccgcaaccggtctgggtgttttgctgatggcaaccctgtttccggtgatggtaaacgttggtatcagtcgtggcgcagcagctgccatttgtgcctccccggcggcgattattctcgcaccgacttcaggggatgtggtgctggcggcgcaggcttccgaaatgtcgctgattgacttcgccttcaaaacgacgctgcctatctcaattgctgcaattatcggcatggcgatcgcccacttcttctggcaacgttatctggataaaaaagagcacatctctcatgaaatgttagatgtcagtgaaatcaccaccactgcccccgcgttttatgccattttgccgttcacgccgatcatcggtgtactgatttttgacggtaaatggggtccgcaattacacatcatcactattctggtgatttgtatgctgattgcctccattctggagttcctccgcagctttaatacccagaaagttttctctggtctggaagtggcttatcgcgggatggcagatgcgtttgctaacgtggtgatgctgctggttgccgctggggtattcgctcaggggcttagcaccatcggctttattcaaagtctgatttctatcgctacctcgtttggttcggcgagtatcatcctgatgctggtattggtgattctgaccatgctggcggcagtcacgaccggttcaggcaatgcgccgttttatgcgtttgttgagatgatcccgaaactggcgcactcttccggcattaacccggcgtatttgactatcccgatgctgcaggcgtcaaacctggntcgtaccctatcacccgtttctggcgtagtcgttgcggttgccgggatggcgaaaatctcaccatttgaagtcgtaaaacgcacctcggtgccggtgcttgttgggctagtgattgttatcgttgctacagagctgatggtgccaggaacggcagcagcggtcacaggcaagtaa

SEQ ID NO: 7180 - protein, 461 aa, Shigella flexneri
  misc_feature (404)..(404): Xaa can be any naturally occurring amino acid
MLTFIELLIGVVVIVGVARYIIKGYSATGVLFVGGLLLLIISAIMGHKVLPSSQASTGYSATDIVEYVKILLMSRGGDLGMMIMMLCGFAAYMTHIGANDMVVKLASKPLQYINSPYLLMIAAYFVACLMSLAVSSATGLGVLLMATLFPVMVNVGISRGAAAAICASPAAIILAPTSGDVVLAAQASEMSLIDFAFKTTLPISIAAIIGMAIAHFFWQRYLDKKEHISHEMLDVSEITTTAPAFYAILPFTPIIGVLIFDGKWGPQLHIITILVICMLIASILEFLRSFNTQKVFSGLEVAYRGMADAFANVVMLLVAAGVFAQGLSTIGFIQSLISIATSFGSASIILMLVLVILTMLAAVTTGSGNAPFYAFVEMIPKLAHSSGINPAYLTIPMLQASNLXRTLSPVSGVVVAVAGMAKISPFEVVKRTSVPVLVGLVIVIVATELMVPGTAAAVTGK

SEQ ID NO: 7181 - DNA, 2535 bp, Shigella flexneri
  misc_feature (1202)..(1202): n is a, c, g or t
atggccgggaatgaccgcgagccaattggacgcaaagggaaactgacgcgtccggtcaaacaaaaggtaagccgtcgtcgttacgaagatgacgatgattacgacgattatgatgactatgaggatgaagaaccgatgccgcgcaaaggtaagggcaaaggcaaagggcgtaagcctcgtggcaaacgcggctggctatggctactgctaaaactggctatcgtttttgccgtgctgatcgccatttacggcgtttatctcgatcaaaaaattcgtagccgtattgatggcaaggtctggcaactgcccgcggcagtttatggccgaatggtcaaccttgaaccagatatgaccatcagcaagaacgaaatggtgaagctgctggaggcaacacagtatcgtcaggtgtcgaaaatgacccgtcctggcgaatttaccgtgcaggccaacagcattgagatgatccgccgtccgtttgatttcccggacagtaaagaagggcaggtgcgtgcgcgtctgacctttgatggtgatcatctggcgaccatcgtcaatatggagaacaaccgtcagttcggtttcttccgtcttgatccgcgtctgatcaccatgatctcctcgccaaacggtgagcagcgtttgtttgtgccgcgcagtggtttccctgatttgctggtggatactttgctggcgacagaagaccgtcatttttacgagcatgatggaatcagtctctactccattgggcgtgcggtgctggcaaacctgaccgcaggtcgcacggtgcagggtgcgagtacgctgacgcaacagctggtgaaaaacctgttcctctccagcgagcgttcttactggcgtaaagcgaacgaagcttacatggcgctgatcatggacgcgcgttacagcaaagaccgtattcttgagctgtatatgaacgaggtgtatctcggtcagagcggcgacaacgaaatccgcggcttcccgctggcaagcttgtattactttggtcgcccggtagaagagctaagcctcgaccagcaggcgctgttagtcggtatggtgaaaggggcgtccatctacaacccgtggcgtaacccgaaactggcgctggagcgacgtaatctggtgctgcgtctgctgcaacagcaacagattattgatcaagaactctatgacatgttgagtgcccgtccgctgggggntcagccgcgtggtggggtgatctctcctcagccagcctttatgcagctggtgcgtcaggagttgcaggcaaaactgggcgataaggtaaaagatctctccggcgtgaagatcttcactacctttgactcggtggcccaggacgcggcagaaaaagccgccgtggaaggcattccggcactgaagaaacagcgtaagttgagcgatcttgaaactgcgattgtggtcgtcgaccgctttagtggtgaagttcgtgcgatggtcggaggttctgagccgcagtttgcgggctacaaccgtgcgatgcaggcgcgtcgttcgattggttcccttgcaaaaccagcgacttatctgacggctttaagccagccgaaaatctatcgcctgaacacgtggattgccgatgcgccaatcgcgctgcgtcagccgaatggccaggtctggtcaccgcagaacgatgaccgtcgttatagcgaaagcggcagagtgatgctggtggatgcgttgacacgttcgatgaacgtgccgacggtaaatctggggatggcgctggggctgcctgcggttacggagacctggatcaaactgggcgtaccgaaagatcagttgcatccggttccggcaatgctgctgggggcgttgaacttaacgccaatcgaagtggcgcaggcattccagaccatcgccagcggtggtaaccgtgcaccgctttctgcactgcgttcggtaatcgcggaagatggtaaggtgctgtatcagagcttcccgcaggcagaacgcgctgttccggcgcaggcggcgtatctgacactatggaccatgcagcaggtggtacaacgtggtacgggtcgtcagcttggggcgaaatacccgaacctgcatctggcagggaaaacagggactaccaacaataacgtagatacctggtttgcaggcattgacggcagcacggtgaccatcacctgggtaggccgtgataacaaccagccgaccaaactgtatggagccagcggggcaatgtcgatttatcagcgttatctggctaaccagacgccaacgccgctgaatcttgttccgccagaagatattgcagatatgggcgtggactacgacggcaactttgtttgcagcggtggcatgcgtgtcttgccggtctggaccagcgatccgcaatcgctgtgccagcagagcgagatgcagcagcagccgtcaggcaatccgtttgatcagtcttctcagccgcagcaacagccgcaacagcaacctgctcagcaagagcagaaagacagcgacggtgtagccggttggatcaaggatatgtttggtagtaattaa

SEQ ID NO: 7182 - protein, 844 aa, Shigella flexneri
  misc_feature (401)..(401): Xaa can be any naturally occurring amino acid
MAGNDREPIGRKGKLTRPVKQKVSRRRYEDDDDYDDYDDYEDEEPMPRKGKGKGKGRKPRGKRGWLWLLLKLAIVFAVLIAIYGVYLDQKIRSRIDGKVWQLPAAVYGRMVNLEPDMTISKNEMVKLLEATQYRQVSKMTRPGEFTVQANSIEMIRRPFDFPDSKEGQVRARLTFDGDHLATIVNMENNRQFGFFRLDPRLITMISSPNGEQRLFVPRSGFPDLLVDTLLATEDRHFYEHDGISLYSIGRAVLANLTAGRTVQGASTLTQQLVKNLFLSSERSYWRKANEAYMALIMDARYSKDRILELYMNEVYLGQSGDNEIRGFPLASLYYFGRPVEELSLDQQALLVGMVKGASIYNPWRNPKLALERRNLVLRLLQQQQIIDQELYDMLSARPLGXQPRGGVISPQPAFMQLVRQELQAKLGDKVKDLSGVKIFTTFDSVAQDAAEKAAVEGIPALKKQRKLSDLETAIVVVDRFSGEVRAMVGGSEPQFAGYNRAMQARRSIGSLAKPATYLTALSQPKIYRLNTWIADAPIALRQPNGQVWSPQNDDRRYSESGRVMLVDALTRSMNVPTVNLGMALGLPAVTETWIKLGVPKDQLHPVPAMLLGALNLTPIEVAQAFQTIASGGNRAPLSALRSVIAEDGKVLYQSFPQAERAVPAQAAYLTLWTMQQVVQRGTGRQLGAKYPNLHLAGKTGTTNNNVDTWFAGIDGSTVTITWVGRDNNQPTKLYGASGAMSIYQRYLANQTPTPLNLVPPEDIADMGVDYDGNFVCSGGMRVLPVWTSDPQSLCQQSEMQQQPSGNPFDQSSQPQQQPQQQPAQQEQKDSDGVAGWIKDMFGSN

SEQ ID NO: 7183 - DNA, 927 bp, Shigella flexneri
  misc_feature (329)..(329): n is a, c, g or t
atgaccattgcactggaacttcaacagcttaaaaaaaactatccaggcggcgttcaggcgcttcgtggaatagatttgcaggtcgaagcgggtgatttttatgcgcttctcgggccgaacggggccgggaaatcgaccactatcggtattatcagctctctggtaaataaaacctccgggcgggtcagcgtatttggttacgatctcgagaaagatgtcgtgaacgctaaacgtcagttgggactggtgccgcaggaatttaacttcaacccgtttgaaaccgtgcagcaaattgtggtgaatcaggcagggtactacggtgtggagcncaaagaggcgtacatccgcagcgaaaaatatcttaagcagctcgatttatggggaaaacgcaacgaacgtgcgcgtatgttatctggcgggatgaagcgccgtttaatgattgcccgtgcgttaatgcatgaacctaaactactgattctcgacgaaccgaccgcaggcgtggatattgaacttcgccgctcaatgtggggctttttgaaggatttaaacgacaaaggcaccaccatcattcttaccacacactacctggaagaagcagaaatgctgtgccgcaatatcggcattattcaacatggtgagctggtggaaaatacctcgatgaaggcgctgctggcgaagctgaaatcggaaacctttattctcgatctcgcaccgaaaagtccgttaccgaagctcgatggctatcagtatcgactggtcgataccgcgacgctggaagttgaagtgctacgtgagcaggggatcaacagcgtatttacgcagttaagtgagcagggcattcaggtattaagtatgcgtaacaaagctaaccgtctggaagagctgtttgtttcactggttaatgaaaaacaaggagatcgcgcatga

SEQ ID NO: 7184 - protein, 308 aa, Shigella flexneri
  misc_feature (110)..(110): Xaa can be any naturally occurring amino acid
MTIALELQQLKKNYPGGVQALRGIDLQVEAGDFYALLGPNGAGKSTTIGIISSLVNKTSGRVSVFGYDLEKDVVNAKRQLGLVPQEFNFNPFETVQQIVVNQAGYYGVEXKEAYIRSEKYLKQLDLWGKRNERARMLSGGMKRRLMIARALMHEPKLLILDEPTAGVDIELRRSMWGFLKDLNDKGTTIILTTHYLEEAEMLCRNIGIIQHGELVENTSMKALLAKLKSETFILDLAPKSPLPKLDGYQYRLVDTATLEVEVLREQGINSVFTQLSEQGIQVLSMRNKANRLEELFVSLVNEKQGDRA

SEQ ID NO: 7185 - DNA, 2736 bp, Shigella flexneri
  misc_feature (107)..(107): n is a, c, g or t
atgacgcatctggaactggttcccgtcccgcctgtcgcgcaactggcgggcgtgagccagcattatggaaaaaccgttgcgctgaacaatatcactctcgatattcnggcccgttgcatggtcgggctgattggtccggatggcgtcgggaagtcgagtttattgtcactgatttccggtgcccgcgtcattgagcagggcaatgtggtggtgctgggtggcgatatgcacgacccgaagcatcgccgagacgtctgcccgcgcatcgcctggatgccgcaggggctgggcaaaaacctctaccacaccttgtcggtgtatgaaaatgtcgattttttcgctcgcctgttcggtcacgataaagcggagcgggaagtgcgaattaatgagctgctgaccagcaccgggttagcaccgtttcgcgatcgtccggcaggtaaactctccggcgggatgaagcaaaaacttgggctgtgctgcgcgttaatccacgacccggaactgttgatccttgatgagccaacaacgggggttgacccgctctcccgcgcccagttctgggatctgatcgacagtattcgccagcggcagagcaatatgagcgtgctggtcgccaccgcctatatggaagaggccgaacgcttcgactggctggtagcgatgaatgccggagaagtgctggcaaccggcagcgccgaagagctgcggcagcaaacgcaaagcgccacgctggaagaagcatttattaatctgttaccgcaagcgcaacgccaggcgcatcaggcggtagtgatcccaccgtatcaacctgaaaacgcagagattgccatcgaagcgcgcgatctgaccatgcgttttggttccttcgttgccgttgatcacgtcaatttccgcattccacgcggggagatttttggattccttggttcgaacggctgcggtaaatccaccaccatgaaaatgcttaccggactgctgcccgccagcgaaggtgaggcgtggctatttgggcaaccggttgatccaaaagatatcgatacccgccgtcgtgtgggctatatgtcgcaggcgttttcgctctataacgaactcaccgtgcggcaaaacctggagttacatgcccgtttgtttcacatcccggaagcggaaattcccgcgcgagtggctgaaatgagcgagcgttttaagctcaacgacgttgaagatgttctgccggagtcattgccgctcggcattcgccagcggctttcgctggcggtggcggtgattcatcgcccggagatgttaatcctcgatgagcctacttctggtgtcgatccggtggcgagggatatgttctggcagttgatggtcgatctctcgcgccaggacaaagtgactatcttcatctccacccactttatgaacgaagcggaacgttgcgaccgcatctcactgatgcacgccggaaaagtgcttgccagcggtacaccgcaggaactggttgagaaacgcggagccgccagtctggaagaggcatttatcgcctatttgcaggaagcggcagggcagagcaacgaagccgaagcgccgcccgtggtacacgacaccacccacgcgccgcgtcagggatttagcctgcgccgtctgtttagctacagccgccgcgaagcgctggaactgcgacgcgatccagtacgttcgacgctggcgctgatgggaacggtgatcctgatgctgataatgggttacggcatcagtatggatgtggaaaacctgcgctttgcggtgctcgaccgcgaccagaccgtcagtagccaggcgtggacactcaacctctccggttcccgttactttatcgaacagccgccgctcaccagttatgacgagcttgatcgtcggatgcgtgcgggcgatatcacggtggccattgagatcccgcccaatttcgggcgcgatatcgcgcgtggtacgcctgtggaactcggcgtctggatcgacggagcgatgcccagtcgtgccgaaacggtaaaaggttacgtgcaggcaatgcaccagagttggcttcaggatgtggcgagccgacaatcgacacccgccagccaaagcgggctgatgaacattgagacgcgttatcgctataacccggacgtaaaaagcctgccagcgattgttccggcggtgatcccgcttctgctgatgatgatcccgtcaatgctaagcgcccttagcgtggtgcgggaaaaagagctagggtcgattatcaacctttacgtgacccccaccacccgtagcgaatttttgcttggcaaacagctgccgtacatcgcgctggggatgctgaactttttcctgctctgcggcctgtcggtgtttgtgtttggcgtaccgcataaaggcagtttcctgacgctcaccttggcggcgctgctgtatatcatcattgccactggaatggggctgctgatctccacctttatgaaaagccagattgccgccattttcggaacggcgattatcacattgatcccggcgacacagttttccgggatgatcgatccggtagcttcgctggaagggcctggacgttggatcggcgaggtttacccgaccagtcattttctgactatcgcccgcggaacgttctcgaaagcgctggatctgactgatttgtggcaactttttatcccgttgctgatagccatcccgctggtgatgggcttaagcatcctgctgctgaaaaaacaggagggatga

SEQ ID NO: 7186 - protein, 911 aa, Shigella flexneri
  misc_feature (36)..(36): Xaa can be any naturally occurring amino acid
MTHLELVPVPPVAQLAGVSQHYGKTVALNNITLDIXARCMVGLIGPDGVGKSSLLSLISGARVIEQGNVVVLGGDMHDPKHRRDVCPRIAWMPQGLGKNLYHTLSVYENVDFFARLFGHDKAEREVRINELLTSTGLAPFRDRPAGKLSGGMKQKLGLCCALIHDPELLILDEPTTGVDPLSRAQFWDLIDSIRQRQSNMSVLVATAYMEEAERFDWLVAMNAGEVLATGSAEELRQQTQSATLEEAFINLLPQAQRQAHQAVVIPPYQPENAEIAIEARDLTMRFGSFVAVDHVNFRIPRGEIFGFLGSNGCGKSTTMKMLTGLLPASEGEAWLFGQPVDPKDIDTRRRVGYMSQAFSLYNELTVRQNLELHARLFHIPEAEIPARVAEMSERFKLNDVEDVLPESLPLGIRQRLSLAVAVIHRPEMLILDEPTSGVDPVARDMFWQLMVDLSRQDKVTIFISTHFMNEAERCDRISLMHAGKVLASGTPQELVEKRGAASLEEAFIAYLQEAAGQSNEAEAPPVVHDTTHAPRQGFSLRRLFSYSRREALELRRDPVRSTLALMGTVILMLIMGYGISMDVENLRFAVLDRDQTVSSQAWTLNLSGSRYFIEQPPLTSYDELDRRMRAGDITVAIEIPPNFGRDIARGTPVELGVWIDGAMPSRAETVKGYVQAMHQSWLQDVASRQSTPASQSGLMNIETRYRYNPDVKSLPAIVPAVIPLLLMMIPSMLSALSVVREKELGSIINLYVTPTTRSEFLLGKQLPYIALGMLNFFLLCGLSVFVFGVPHKGSFLTLTLAALLYIIIATGMGLLISTFMKSQIAAIFGTAIITLIPATQFSGMIDPVASLEGPGRWIGEVYPTSHFLTIARGTFSKALDLTDLWQLFIPLLIAIPLVMGLSILLLKKQEG

SEQ ID NO: 7187 - DNA, 3594 bp, Shigella flexneri
  misc_feature (2621)..(2621): n is a, c, g or t
atgaagtttttaccctatttttttcttctctgttgtggtctttggtcgaccataagtttcgcagacgaagattacatcgaatatcgtggcatcagtagtaacaaccgtgtcacacttgatccagtacgtctgagcaacaaggaattacgttggttagcgagcaaaaaaaatcttgtgattgcagtacacaagtcccaaacggctaccttgttgcataccgattcgcagcaacaggttcgtggtattaatgctgattatttaaatcttttaaaaagagcgttaaatatcaaattaacactccgggaatacgcagatcatcaaaaagcaatggacgcgcttgcagaaggtgaagtcgatatagtgttatcacatttagttacttcgccgcctcttaataatgacattgctgcaaccaaaccattgataattacctttccggcgctggtaaccacccttcacgactcaatgcgaccgcttacctcaccaaaaccagtaaatattgctcgggtagcaaattaccccccagacgaggtaattcatcaatcatttccaaaagcaacaattatctcttttacaaatttatatcaggcattagcatccgtctcagctgggcacaatgattactttattggtagtaacatcattaccagcagtatgatttcccgctatttcactcactccttaaatgtagtgaaatattataactcgccgcgtcaatataattttttcttgaccagaaaagaatctgtcattcttaatgaagtactcaatagatttgttgatgctttaacaaatgaagttcgctatgaagtatcacaaaattggcttgatacaggaaacctggcctttctgaacaaaccattagaactcactgaacatgaaaaacagtggattaagcagcatcccaatttaaaggtgctggaaaatccttactcgcccccctattctatgacggatgaaaatggctcggttcggggcgttatgggggacattcttaatattattaccttgcaaacaggtttaaatttttctccgatcaccgtttcacacaatatccatgctggaacacaacttagccccggaggatgggatataatacctggcgctatttatagtgaagatcgagaaaataatgttttatttgctgaagccttcataacaacgccttacgtttttgtcatgcaaaaagcgcctgacagtgaacaaacattaaaaaaaggaatgaaagttgccattccatattattatgagctgcattcgcaattaaaagagatgtatccggaggttgaatggatacaggtcgataatgccagcgctgcatttcacaaggttaaggaaggtgaacttgatgctctggtcgcgacacagctaaattcgcgttacatgatcgatcattactatcctaatgaactttatcattttcttattcctggcgttccgaatgcatcgctttcgttcgcttttcctcgcggagaaccggaacttaaggatattattaataaagcactgaatgcaattcccccaagcgaagttctgcgcctgacggaaaaatggattaaaatgcccaatgtgaccattgacacatgggacctatatagcgagcaattttatattgttacgacattatccgttttattagttggcagtagccttttatggggattctacctgttacgctcagttcgtcgtcgtaaagtcattcagggtgatttagaaaaccaaatatcattccgaaaagcactctcggattccttaccgaatccaacttatgttgtaaactggcaaggtaatgtcattagtcataatagtgcttttgaacattatttcactgcggattactacaaaaatgcaatgttaccattagaaaacagtgattcaccctttaaagatgttttttctaatgcgcatgaagtcacagcagaaacgaaagaaaatcgaacaatatacacacaggtatttgaaattgataatggcatcgagaaaagatgcattaatcactggcatacattatgcaatcttcctgcaagtgacaatgcagtatatatttgtggttggcaagatattactgaaacgcgtgatctaattaatgcactcgaggtagaaaaaaataaagcgataaaggctaccgtagcaaaaagtcagtttctggcaacgatgagtcacgaaataagaacaccaataagctctattatgggcttcctggaacttctgtcgggttctggtcttagcaaggagcaacgggtggaggcgatttcacttgcctacgccaccggacaatcactcctcggcttaattggtgaaatccttgatgtcgacaaaattgaatcgggtaactatcaacttcaaccacaatgggtcgatatccctactttagtccagaacacttgtcactctttcggtgcgattgctgcaagcaaatcgatcgcattaagttgcagcagtacatttcctgatcattacctggttaagatcgaccctcaggcgtttaagcaggtcttatcaaatttactgagtaatgctctcaaatttaccaccgagggggcagtaaaaattacgacctccctgggtcacattgatgacaaccacgctgttatcaaaatgacgattatggattctggaantggattatcgcaggaagaacaacaacaactgtttaagcgctacagccaaacaagtgcaggtcgtcagcaaacaggttctggtttaggcttaatgatctgcaaagaattaattaaaaatatgcagggcgatttatcattagaaagtcatccaggcataggaacaacatttacgatcacaatcccggtagaaattagccagcaagtggcgactgtcgaggcaaaagcagaacaacccatcacactacctgaaaagttgagcatattaatcgcggatgatcatccgaccaacaggctattactcaaacgccagctaaatctattaggatatgatgttgatgaagccactgatggtgtgcaagcgctacacaaagtcagtatgcaacattatgatctgcttattactgacgttaatatgccgaatatggatggttttgagttgactcgcaaactccgtgagcaaaattcttccttacccatctgggggcttacagccaacgcacaggctaacgaacgtgaaaaagggttaagttgcggcatgaacttatgtttgttcaaaccgttgaccctggatgtactgaaaacacatttaagtcagttacaccaggttgcgcatattgcacctcagtatcgccaccttgatatcgaagccctgaaaaataatacggcgaatgatctacaactgatgcaggagattctcatgactttccagcatgaaacgcataaagatctacccgctgcgtttcatgcactagaagctggcgataacagaactttccatcagtgtattcatcgcatccacggtgcggctaacatcctgaatttgcaaaagttgattaatattagccatcagttagaaataacacctgcttcagatgacagtaagcctgaaattcttcagctgctgaactctgttaaagaacacattgcagagctggaccaggagattgctgttttctgtcagaaaaatgactaa

SEQ ID NO: 7188 - protein, 1197 aa, Shigella flexneri
  misc_feature (874)..(874): Xaa can be any naturally occurring amino acid
MKFLPYFFLLCCGLWSTISFADEDYIEYRGISSNNRVTLDPVRLSNKELRWLASKKNLVIAVHKSQTATLLHTDSQQQVRGINADYLNLLKRALNIKLTLREYADHQKAMDALAEGEVDIVLSHLVTSPPLNNDIAATKPLIITFPALVTTLHDSMRPLTSPKPVNIARVANYPPDEVIHQSFPKATIISFTNLYQALASVSAGHNDYFIGSNIITSSMISRYFTHSLNVVKYYNSPRQYNFFLTRKESVILNEVLNRFVDALTNEVRYEVSQNWLDTGNLAFLNKPLELTEHEKQWIKQHPNLKVLENPYSPPYSMTDENGSVRGVMGDILNIITLQTGLNFSPITVSHNIHAGTQLSPGGWDIIPGAIYSEDRENNVLFAEAFITTPYVFVMQKAPDSEQTLKKGMKVAIPYYYELHSQLKEMYPEVEWIQVDNASAAFHKVKEGELDALVATQLNSRYMIDHYYPNELYHFLIPGVPNASLSFAFPRGEPELKDIINKALNAIPPSEVLRLTEKWIKMPNVTIDTWDLYSEQFYIVTTLSVLLVGSSLLWGFYLLRSVRRRKVIQGDLENQISFRKALSDSLPNPTYVVNWQGNVISHNSAFEHYFTADYYKNAMLPLENSDSPFKDVFSNAHEVTAETKENRTIYTQVFEIDNGIEKRCINHWHTLCNLPASDNAVYICGWQDITETRDLINALEVEKNKAIKATVAKSQFLATMSHEIRTPISSIMGFLELLSGSGLSKEQRVEAISLAYATGQSLLGLIGEILDVDKIESGNYQLQPQWVDIPTLVQNTCHSFGAIAASKSIALSCSSTFPDHYLVKIDPQAFKQVLSNLLSNALKFTTEGAVKITTSLGHIDDNHAVIKMTIMDSGXGLSQEEQQQLFKRYSQTSAGRQQTGSGLGLMICKELIKNMQGDLSLESHPGIGTTFTITIPVEISQQVATVEAKAEQPITLPEKLSILIADDHPTNRLLLKRQLNLLGYDVDEATDGVQALHKVSMQHYDLLITDVNMPNMDGFELTRKLREQNSSLPIWGLTANAQANEREKGLSCGMNLCLFKPLTLDVLKTHLSQLHQVAHIAPQYRHLDIEALKNNTANDLQLMQEILMTFQHETHKDLPAAFHALEAGDNRTFHQCIHRIHGAANILNLQKLINISHQLEITPASDDSKPEILQLLNSVKEHIAELDQEIAVFCQKND

SEQ ID NO: 7189 - DNA, 2361 bp, Shigella flexneri
  misc_feature (2083)..(2083): n is a, c, g or t
atgaagcgagttcttattcctggcgtcattttatgtggcgctgatgtggcgcaggccgtcgatgacaaaaacatgtacatgtatttttttgaagagatgacggtctatgctcctgtccctgtacccgtaaacggcaacacgcattacaccagtgaaagcatcgagcgtttaccgaccgggaatggcaatatcagcgatctgctgagaaccaaccctgcggtacgcatggattcaacgcaaagtacctcgttgaaccagggagatattcgccctgagaaaatctctattcacggtgcgtcgccctaccagaatgcctatttgattgacggtattagtgcaactaataacctgaacccagcgaatgagtccgatgccagtagtgcaaccaatattagcgggatgtcacaggggtattatcttgatgtcagcttactggacaatgtgacgctttatgacagttttgtgccggttgaatttggtcgcttcaatggcggggtaattgatgcaaagatcaaacgcttcaacgctgatgatagcaaggtgaaattgggttatcgcactacgcgtttggactggttaacatcgcatatcgatgagaataacaagagcgcatttaatcaaggttcttcaggaagtacctatttctctccagattttaaaaagaacttttataccttgtcgtttaatcaggagctggctgataactttggcgttaccgccggtttatcgcgccgccagtctgatatcacccgcgcggattatgtttcgaatgacggcattgtcgccggtcgggcacagtataaaaacgttatcgatactgcattgagcaaatttacctggtttgccagcgaccgctttacccacgatttaaccttaaaatataccggctccagccgtgattataataccagcaccttcccgcagtctgatcgcgaaatgggtaataaatcctatggtctggcatgggatatggatacgcaactcgcatgggccaaactacgtaccaccgttggttgggatcatattagtgattatacccgtcacgatcatgacatctggtacaccgaactttcatgtacatatggtgatattacagggcgttgtacccgtggcggattaggacacatttcccaggctgtagataattacaccttcaaaacacgcctggactggcaaaaattcgccgtgggtgatgtttcgcatcaaccctacttcggcgcggaatacatctattccgatgcatggactgaacgccataaccagtctgaatcctatgtgattaatgctgcaggaaagaaaactaaccataccatttaccataaaggtaaaggcagcctgggaattaacaactacacgctgtatatggcggatcacattagctggcggaatgtgtcgttaatgcccggtgtgcgttatgactatgacaactatctgtcaaaccacaatatctccccgcgctttatgacggaatgggatatttttgctgatcaaacctcaatgattaccgccggttataaccgttactatggcgggaatattcttgatatgggattacgtgatatccgcaatagctggacggaatcggtatcaggtaataaaaccctgacgcgttatcagaatttgaaaacgccttataacgatgaactggcaatgggattgcagcaaaaaatcgataagaacgttattgcacgcgcaagtgaagcgcatgatcaaatcagcaaaagcagtcgtaccgacagcgcgactaaaaccaccattactgaatataacaacgatggcaaaaccaaaacgcattcgtttaacctcagttttgaactggccgaacccctgcatatccgccaggtagatattaacccgcaaattgtctttagctatatcaagagcaagggcaacttgtcgttaaacaatggttatgaggagagcaataccggtgataaccaggtggtttataacggtaatctggtctcttacgatagcgttccagtggcagattttaataacccattaaagatctccttaaacatggatttcacgcatcaaccgagcgggttagtgtgggcgaatacgctggcctggcaagaancgcgtaaagctcgcattatccttggtaagacaaatgcgcaatacatcagcgaatattcagattacaagcagtatgttgacgaaaaactggatagcagcctgacctgggacacccgcttgtcctggacgccacaatttctgaaacaacaaaacctgacgatcagtgccgatattctcaatgtactggatagcaaaaccgctgttgatacaacgaacaccggtgtggcgacctacgccagtggccgtactttctggcttgatgtcagcatgaaattttaa

SEQ ID NO: 7190 - protein, 786 aa, Shigella flexneri
  misc_feature (695)..(695): Xaa can be any naturally occurring amino acid
MKRVLIPGVILCGADVAQAVDDKNMYMYFFEEMTVYAPVPVPVNGNTHYTSESIERLPTGNGNISDLLRTNPAVRMDSTQSTSLNQGDIRPEKISIHGASPYQNAYLIDGISATNNLNPANESDASSATNISGMSQGYYLDVSLLDNVTLYDSFVPVEFGRFNGGVIDAKIKRFNADDSKVKLGYRTTRLDWLTSHIDENNKSAFNQGSSGSTYFSPDFKKNFYTLSFNQELADNFGVTAGLSRRQSDITRADYVSNDGIVAGRAQYKNVIDTALSKFTWFASDRFTHDLTLKYTGSSRDYNTSTFPQSDREMGNKSYGLAWDMDTQLAWAKLRTTVGWDHISDYTRHDHDIWYTELSCTYGDITGRCTRGGLGHISQAVDNYTFKTRLDWQKFAVGDVSHQPYFGAEYIYSDAWTERHNQSESYVINAAGKKTNHTIYHKGKGSLGINNYTLYMADHISWRNVSLMPGVRYDYDNYLSNHNISPRFMTEWDIFADQTSMITAGYNRYYGGNILDMGLRDIRNSWTESVSGNKTLTRYQNLKTPYNDELAMGLQQKIDKNVIARASEAHDQISKSSRTDSATKTTITEYNNDGKTKTHSFNLSFELAEPLHIRQVDINPQIVFSYIKSKGNLSLNNGYEESNTGDNQVVYNGNLVSYDSVPVADFNNPLKISLNMDFTHQPSGLVWANTLAWQEXRKARIILGKTNAQYISEYSDYKQYVDEKLDSSLTWDTRLSWTPQFLKQQNLTISADILNVLDSKTAVDTTNTGVATYASGRTFWLDVSMKF

SEQ ID NO: 7191 - DNA, 561 bp, Shigella sonnei
  misc_feature (424)..(424): n is a, c, g or t
atgaacaagtttttatttgccgctgcattgatcgtcagtggcctgctcgttggctgtaatcaactcacccaatacaccatcaccgaacaagaaattaaccagtcgcttgcgaaacataataatttctcaaaagatatcggtttacccggcgtggctgacgcccatattgttctgacaaacttgatcagccaaattggtcgcgaagagccgaataaggttaccctaaccggagacgccaatctggacatgaactccctgttcggtagtcagaaagcgaccatgaaactgaagctgaaagcgctgcccgtgtttgataaagaaaaaggtgcgatcttcctgaaagagatggaagtggtcgatgcgacggtacaaccggaaaaaatgcaaacggtgatgcaaacgttgcttccctatttgaaccagncattacgcaattactttaaccagcaacctgcttacgtcctgcgcgaagatggcagtcagggcgaagcaatggcgaaaaaactggcgaaaggcattgaagtgaagccaggcgaaattgtcattccgtttacggattaa

SEQ ID NO: 7192 - protein, 186 aa, Shigella sonnei
  misc_feature (142)..(142): Xaa can be any naturally occurring amino acid
MNKFLFAAALIVSGLLVGCNQLTQYTITEQEINQSLAKHNNFSKDIGLPGVADAHIVLTNLISQIGREEPNKVTLTGDANLDMNSLFGSQKATMKLKLKALPVFDKEKGAIFLKEMEVVDATVQPEKMQTVMQTLLPYLNQXLRNYFNQQPAYVLREDGSQGEAMAKKLAKGIEVKPGEIVIPFTD

SEQ ID NO: 7193 - DNA, 1704 bp, Escherichia coli
  misc_feature (1589)..(1589): n is a, c, g or t
atgagccagagaattactattgatccggtaacccgtattgaggggcatttacgcatcgattgcgaaatcgaaaatggcgtcgtttcgaaagcatgggcttccggtaccatgtggcgcggcatggaagagatcgtgaaaaaccgcgatccgcgcgatgcatggatgattgtgcaacgtatctgtggcgtatgtactaccactcacgcgctgtcttccgttcgtgcggcagaaagtgcgctgaatatcgacgttccggttaacgcgcaatacatccgtaacatcattctggctgcgcacaccacgcatgaccatatcgttcatttctatcagctttcggcgctggactgggtggacatcacttctgcactgcaagctgacccaaccaaagcctccgaaatgctgaaaggcgtttcgacctggcatctgaacagtccggaagagttcactaaagttcagaacaagatcaaagatctggttgccagcggtcagttgggtattttcgccaatggctactggggtcacccggcgatgaaactgccgccggaagtgaacctgattgcggtagcgcactacctgcaggcgctggagtgccagcgtgacgctaaccgcgtcgtggcgctgctgggcggtaaaacgccgcacattcagaacctggcggtaggtggtgtcgcgaacccgatcaacctcgacggtttgggcgtgctgaaccttgagcgcctgatgtacatcaagtctttcatcgacaagctgagcgactttgttgaacaggtttataaggttgataccgcagttattgccgcgttctacccggaatggctgacgcgcggtaaaggtgcggtgaactacctgagcgtgccggaattcccgaccgacagtaaaaacggcagcttcctgttcccgggcggctacattgagaatgcggatctgtcctcgtatcgtccgatcacttctcattccgatgaatacctgatcaaaggcattcaggaaagcgcgaagcactcctggtataaagacgaagcgccgcaggcaccgtgggaaggtaccaccattccggcttatgatggttggtctgacgacgggaaatattcctgggtgaaatcaccgactttctacggcaaaacggtagaagtgggtccgctggctaatatgctggtgaaactggcggcaggtcgcgaatctacccagaacaaactgaatgaaatcgttgcgatttatcagaaactgactggcaacacgctggaagtggcgcagctgcactccacgctgggccgtattattggtcgtaccgttcactgctgcgaattgcaggatatcctgcaaaatcaatacagtgcactgatcaccaatatcggcaaaggcgatcacaccacctttgtgaaaccgaacattccggcaacgggtgagttcaaaggtgttggcttcctcgaagcgccgcgcggtatgctctctcactggatggttattaaagacggtattatcagtaactaccaggcagttgttccatcaacctggaactctggtccgcgtaacttcaatgatgacgtcggtccttacgagcagtcgctggtgggtacaccggttgctgatcngaataaaccgctggaagtggtgcgtaccattcactccttcgacccgtgcatggcctgtgcggtacacgtagtggatgccgacggcaacgaagtggtttcagtgaaggttctgtaa

SEQ ID NO: 7194 - protein, 567 aa, Escherichia coli
  misc_feature (530)..(530): Xaa can be any naturally occurring amino acid
MSQRITIDPVTRIEGHLRIDCEIENGVVSKAWASGTMWRGMEEIVKNRDPRDAWMIVQRICGVCTTTHALSSVRAAESALNIDVPVNAQYIRNIILAAHTTHDHIVHFYQLSALDWVDITSALQADPTKASEMLKGVSTWHLNSPEEFTKVQNKIKDLVASGQLGIFANGYWGHPAMKLPPEVNLIAVAHYLQALECQRDANRVVALLGGKTPHIQNLAVGGVANPINLDGLGVLNLERLMYIKSFIDKLSDFVEQVYKVDTAVIAAFYPEWLTRGKGAVNYLSVPEFPTDSKNGSFLFPGGYIENADLSSYRPITSHSDEYLIKGIQESAKHSWYKDEAPQAPWEGTTIPAYDGWSDDGKYSWVKSPTFYGKTVEVGPLANMLVKLAAGRESTQNKLNEIVAIYQKLTGNTLEVAQLHSTLGRIIGRTVHCCELQDILQNQYSALITNIGKGDHTTFVKPNIPATGEFKGVGFLEAPRGMLSHWMVIKDGIISNYQAVVPSTWNSGPRNFNDDVGPYEQSLVGTPVADXNKPLEVVRTIHSFDPCMACAVHVVDADGNEVVSVKVL

SEQ ID NO: 7195 - DNA, 1338 bp, Shigella sonnei
  misc_feature (158)..(158): n is a, c, g or t
atgggaagccaggaactccaacgcaagctcggattttgggccgttcttgcaatcgccgtcgggacaaccgtcggctccggtatttttgtatctgtgggtgaagtggcaaaagcagcgggcacgccgtggcttacggtgctcgcgtttgtcattggcgngttaattgtgatcccgcaaatgtgcgtctatgcggaactatccaccgcttatccggaaaatggcgcagattatgtttatctgaaaaatgccggaagccgaccgctggctttcctctccggctgggccagcttctgggccaacgatgcgccgtcattgtcgattatggcgctggcgattgtcagcaatcttggctttttaacgcctatcgatccgttgctcggtaaatttatcgccgccggattaattatcgcctttatgttgctacacctgcgctccgttgaaggcggcgcagcgtttcagacgctaattaccatcgccaaaattatcccgttcactatcgtcattggccttgggatcttctggtttaaagcggagaattttgccgcccctaccaccactgcgattggcgcaacgggcagctttatggcgctgctggcggggatctctgccaccagttggtcgtataccggcatggcctctatctgttatatgaccggcgaaattaaaaaccccggaaaaaccatgccacgagcgctgattggttcctgtctgctggttctggtgctctacaccctgctggcgctggtgatttccggcctgatgcccttcgacaaactcgccaattctgaaacgccgatttccgacgccctgacctggatccccgcactcggcagcaccgctgggatctttgttgccatcacggcgatgatcgtcattcttggttcgctttccagctgcgtgatgtaccagccgcggctggaatacgcgatggcgaaagacaacctgttctttaaatgcttcggccatgtgcatccgaaatacaacacgccggatgtctccatcatcctgcaaggggcgctggggatcttcttcatcttcgtttccgatctcaccagcctgctgggttatttcaccctggtgatgtgtttcaaaaataccctcaccttcggctccatcatctggtgtcgtaaacgcgacgattacaaaccgctgtggcgtactccggctttcgggctgatgaccaccctcgccattgcgtcaagcctcattctggtcgcctcaacctttgtctgggcaccgattcccggccttatctgcgccgtcatcgttattgctactggtctgcctgcttacgccttctgggcgaagcgtagccgccagctcaacgctttgtcgtaa

SEQ ID NO: 7196 - protein, 445 aa, Shigella sonnei
  misc_feature (53)..(53): Xaa can be any naturally occurring amino acid
MGSQELQRKLGFWAVLAIAVGTTVGSGIFVSVGEVAKAAGTPWLTVLAFVIGXLIVIPQMCVYAELSTAYPENGADYVYLKNAGSRPLAFLSGWASFWANDAPSLSIMALAIVSNLGFLTPIDPLLGKFIAAGLIIAFMLLHLRSVEGGAAFQTLITIAKIIPFTIVIGLGIFWFKAENFAAPTTTAIGATGSFMALLAGISATSWSYTGMASICYMTGEIKNPGKTMPRALIGSCLLVLVLYTLLALVISGLMPFDKLANSETPISDALTWIPALGSTAGIFVAITAMIVILGSLSSCVMYQPRLEYAMAKDNLFFKCFGHVHPKYNTPDVSIILQGALGIFFIFVSDLTSLLGYFTLVMCFKNTLTFGSIIWCRKRDDYKPLWRTPAFGLMTTLAIASSLILVASTFVWAPIPGLICAVIVIATGLPAYAFWAKRSRQLNALS

SEQ ID NO: 7197 - DNA, 1023 bp, Shigella sonnei
  misc_feature (302)..(302): n is a, c, g or t
atgttggatattgataaaagcaccgtggactttctggtcaccgaaaatatggttcaggaagtggaaaaagttctcagccatgacgttccgctggtgcacgccatcgtggaagagatggtgaagcgcgacattgatcgtatttatttcgttgcctgcggctcgccactcaacgcggcgcaaacggcgaaacatctggcggatcgcttttccgatcttcaggtctacgccatttccggctgggagttctgcgataacaccccgtatcgcctcgacgatcgttgcgcggtgattggcgtttctgnctacggtaaaacggaagaggtaatcaaagcgctggagctgggccgggcctgcggcgcactcactgcggcgttcaccaaacgcgcggacagcccgattacctcggcggcggaatttagcattgattatcaggccgactgtatctgggaaattcacctgctgctctgctacagcgtggtgctggagatgatcacccgcctcgcgccgaacgcggaaatcggcaagatcaaaaacgatctcaagccgttgccgaatgcgctcggtcatctggtacgcacctgggaagaaaaaggccgccagcttggtgaactggccagccagtggccgatgatttataccgttgctgcgggtccgctgcgtccgctgggttacaaagaaggcattgtaacgctgatggaatttacctggacgcacggctgcgtgattgagagcggagagttccgccatggcccgctggagattgtcgaaccgggcgttccgttcctgttcctgctcggcaatgatgaaagtcgccacaccaccgaacgcgccattaactttgttaaacagcgtactgacaacgtgatcgtcatcgattacgccgaaatttcgcaagggctgcacccgtggctggcaccgttcctgatgttcgtgccaatggagtggctctgctactacctgtctatttacaaagatcacaacccggatgaacgccgctattacggtggtctggtggaatattaa

SEQ ID NO: 7198 - protein, 340 aa, Shigella sonnei
  misc_feature (101)..(101): Xaa can be any naturally occurring amino acid
MLDIDKSTVDFLVTENMVQEVEKVLSHDVPLVHAIVEEMVKRDIDRIYFVACGSPLNAAQTAKHLADRFSDLQVYAISGWEFCDNTPYRLDDRCAVIGVSXYGKTEEVIKALELGRACGALTAAFTKRADSPITSAAEFSIDYQADCIWEIHLLLCYSVVLEMITRLAPNAEIGKIKNDLKPLPNALGHLVRTWEEKGRQLGELASQWPMIYTVAAGPLRPLGYKEGIVTLMEFTWTHGCVIESGEFRHGPLEIVEPGVPFLFLLGNDESRHTTERAINFVKQRTDNVIVIDYAEISQGLHPWLAPFLMFVPMEWLCYYLSIYKDHNPDERRYYGGLVEY

SEQ ID NO: 7199 - DNA, 2553 bp, Shigella sonnei
  misc_feature (2378)..(2378): n is a, c, g or t
gtgaagttcgtaaagtattttttgatccttgcagtctgttgcattctgctgggagcaggctcgatttatggcctataccgctacatcgagccacaactgccggatgtggcgacattaaaagatgttcgcctgcaaattccgatgcagatttacagcgccgatggcgagctgattgctcaatacggtgagaaacgtcgtattccggttacgttggatcaaatcccgccggagatggtgaaagcctttatcgcgacggaagacagccgcttctacgagcatcacggcgttgacccggtggggatcttccgtgcggcaagtgtggcgctgttctccggccacgcgtcacaaggggcgagtaccattacccagcagctggcgagaaacttcttcctcagtccagaacgcacgctgatgcgtaagattaaggaagtcttcctcgcgattcgcattgaacagttgctgacgaaagacgagatcctcgagctttatctgaacaagatttacctcggttaccgcgcctatggtgtcggtgctgcggcacaagtctatttcggtaaaacggtcgaccaactgacgctgaacgaaatggctgtgatagccgggctgccgaaagcgccttccacctttaatccgctctactcaatggatcgtgccgtcgcgcggcgtaacgtcgtactgtcgcggatgctggatgaagggtatatcacccaacaacagttcgatcagacacgcactgaggcgattaacgctaactatcacgcgccggagattgctttctctgcgccgtacctgagcgaaatggtgcgccaggagatgtataaccgttatggcgaaagtgcctatgaagacggttatcgcatttacaccaccatcacccgcaaagtgcagcaggccgcacagcaggcggtacgtaataacgtgctggactacgacatgcgccacggctatcgcggcccggcaaatgtgctgtggaaagtgggcgagtcggcgtgggataacaacaagattaccgatacgctgaaggcgctgccgacctatggtccgctgctgcctgccgcagtcaccagcgccaatcctcaggaagcgacggcaatgctggcggacgggtcgactgtcgcattgagtatggacggcgttcgctgggcgcgtccttaccgttcggatactcagcagggaccgacgccgcgtaaagtgaccgatgttctgcaaacgggtcagcaaatctgggttcgtcaggttggcgatgcatggtggctggcacaagtgccggaagtgaactcggcgctggtgtcgatcaatccgcaaaatggtgccgttatggcgctggtcggtggctttgatttcaatcagagcaagtttaaccgcgccacccaggcactgcgtcaggtgggttccaacatcaaaccgttcctctacaccgcggcgatggataaaggtctgacgctggcaagtatgttgaacgatgtgccaatttctcgctgggatgcaggtgtcggttctgactggcagccgaagaactcaccaccgcagtatgctggtccaattcgcttacgtcaggggctgggtcagtcgaaaaacgtggtgatggtacgtgcaatgcgggcgatgggcgtcgactacgctgcagaatatctgcaacgcttcggcttcccggcgcaaaacattgtccacaccgaatcgctggcgctgggttcagcgtccttcaccccaatgcaggtggcgcgcggctacgcggtcatggcgaacggcggcttcctggtggacccgtggtttatcagcaaaattgaaaacgatcagggcggcgtgattttcgaagcgaaaccgaaagtagcctgcccggaatgcgatattccggtgatttacggtgatacgcagaaatcgaacgtgctggaaaataacgatgttgaagatgtcgctatctcccgcgagcagcagaatgtttctgtaccaatgccgcagctggagcaggcaaatcaggcgttagtggcgaagactggcgcgcaggagtacgcaccgcacgtcatcaacactccgctggcattcctgattaagagtgctttgaacaccaatatctttggtgaaccaggctggcagggtaccggctggcgtgcaggtcgtgatttgcagcgtcgcgatatcggcgggaaaaccggtaccactaacagttcgaaagatgcgtggttctcgggttacggtccgggcgttgtgacctcggtctggattggctttgatgatcaccgtcgtaatctcggtcatacaacggcttccggagcgattaaagatcagatctcaggttacgaaggcggtgccaagagtgcccagcctgcatgggacgcttatatgaaagccgttcttgaaggtgtgccggagcagccgcngacgccgcctccgggtattgtgacggtgaatatcgatcgcagcaccgggcagttagctaatggtggcaacagccgcgaagagtatttcatcgaaggtacgcagccgacacaacaggcggtgcacgaggtgggaacaaccattatcgataatggtgaggcacaggaattgttctga

SEQ ID NO: 7200 - protein, 850 aa, Shigella sonnei
  misc_feature (793)..(793): Xaa can be any naturally occurring amino acid
MKFVKYFLILAVCCILLGAGSIYGLYRYIEPQLPDVATLKDVRLQIPMQIYSADGELIAQYGEKRRIPVTLDQIPPEMVKAFIATEDSRFYEHHGVDPVGIFRAASVALFSGHASQGASTITQQLARNFFLSPERTLMRKIKEVFLAIRIEQLLTKDEILELYLNKIYLGYRAYGVGAAAQVYFGKTVDQLTLNEMAVIAGLPKAPSTFNPLYSMDRAVARRNVVLSRMLDEGYITQQQFDQTRTEAINANYHAPEIAFSAPYLSEMVRQEMYNRYGESAYEDGYRIYTTITRKVQQAAQQAVRNNVLDYDMRHGYRGPANVLWKVGESAWDNNKITDTLKALPTYGPLLPAAVTSANPQEATAMLADGSTVALSMDGVRWARPYRSDTQQGPTPRKVTDVLQTGQQIWVRQVGDAWWLAQVPEVNSALVSINPQNGAVMALVGGFDFNQSKFNRATQALRQVGSNIKPFLYTAAMDKGLTLASMLNDVPISRWDAGVGSDWQPKNSPPQYAGPIRLRQGLGQSKNVVMVRAMRAMGVDYAAEYLQRFGFPAQNIVHTESLALGSASFTPMQVARGYAVMANGGFLVDPWFISKIENDQGGVIFEAKPKVACPECDIPVIYGDTQKSNVLENNDVEDVAISREQQNVSVPMPQLEQANQALVAKTGAQEYAPHVINTPLAFLIKSALNTNIFGEPGWQGTGWRAGRDLQRRDIGGKTGTTNSSKDAWFSGYGPGVVTSVWIGFDDHRRNLGHTTASGAIKDQISGYEGGAKSAQPAWDAYMKAVLEGVPEQPXTPPPGIVTVNIDRSTGQLANGGNSREEYFIEGTQPTQQAVHEVGTTIIDNGEAQELF

SEQ ID NO: 7201 - DNA, 483 bp, Shigella sonnei
  misc_feature (125)..(125): n is a, c, g or t
atgaacaaggttgctcaatattaccgtgaactggtcgcgtcactgagcgaacgcctgcgcaatggcgaacgtgatatcgacgcactggtggaacaggcgcgcgagcgcgtaataaaaacaggggngttaacgcgaaccgaggtcgatgagctgacgcgagctgtaagacgtgacctggaagagttcgccatgagctatgaagagagcctgaaagaagaatctgacagcgtctttatgcgggtgattaaagaaagcttatggcaggagctggcagatatcaccgataaaacgcagcttgaatggcgcgaagttttccaggacctcaatcatcatggggtttatcacagcggagaagtggtcgggctgggaaatctggtctgcgagaaatgtcacttccatctcccgatctacacaccggaagtgctgacgctatgcccgaaatgtggtcatgaccagttccagagacgcccgtttgagccgtaa

SEQ ID NO: 7202 - protein, 160 aa, Shigella sonnei
  misc_feature (42)..(42): Xaa can be any naturally occurring amino acid
MNKVAQYYRELVASLSERLRNGERDIDALVEQARERVIKTGXLTRTEVDELTRAVRRDLEEFAMSYEESLKEESDSVFMRVIKESLWQELADITDKTQLEWREVFQDLNHHGVYHSGEVVGLGNLVCEKCHFHLPIYTPEVLTLCPKCGHDQFQRRPFEP

SEQ ID NO: 7203 - DNA, 852 bp, Shigella sonnei
  misc_feature (517)..(517): n is a, c, g or t
atgtatcacggcgtcagctatctgctctcccgcctgatcaacggcccgctgtccctgcgccagatttactttgccagcagtaacggcccggtgcccgatcttgcgtatcaggtcgattttccacggctggaaattgtgctggaaggtgagtttgttgataccggcgctggagcaacgttagttcccggcgatgtgctgtacgttgccgctggtggctggaatttcccacaatggaaaacacccgctaccacctttagcgtgctgtttggcaaacagcaactcggcttcagcgtcgtgcaatgggatggcaaacaatatcaaaatctggcgaagcaacacgtcgcccgacgcggcccacgtataggttcttttctgctacaaacgctcaatgaaatgcaaatgcagccgcaggagcagcaaacggcaaggcttatcgtagccagcctgcttagccactgccgcgatttgctcggcagccaaatccagaccgcctcacgcagccaggcactatttgaanctattcgcgattatatcgacgaacgctatgcctccgcgcttacccgcgaatctgtcgcacaggcattctatatttcaccaaactatctctcgcacctgtttcaaaaaacgggggccattggttttaacgaatacctgaatcacacgcgactggagcacgctaagacgttattgaaaggctatgacctgaaggtaaaagaagtggcgcacgcctgcggctttgtcgacagcaactacttctgccgtctgtttcgtaaaaacaccgaacgctcgccgtcggaatatcgccggcagtaccacagccaactgacagaaaaaccgactactccagaataa

SEQ ID NO: 7204 - protein, 283 aa, Shigella sonnei
  misc_feature (173)..(173): Xaa can be any naturally occurring amino acid
MYHGVSYLLSRLINGPLSLRQIYFASSNGPVPDLAYQVDFPRLEIVLEGEFVDTGAGATLVPGDVLYVAAGGWNFPQWKTPATTFSVLFGKQQLGFSVVQWDGKQYQNLAKQHVARRGPRIGSFLLQTLNEMQMQPQEQQTARLIVASLLSHCRDLLGSQIQTASRSQALFEXIRDYIDERYASALTRESVAQAFYISPNYLSHLFQKTGAIGFNEYLNHTRLEHAKTLLKGYDLKVKEVAHACGFVDSNYFCRLFRKNTERSPSEYRRQYHSQLTEKPTTPE

SEQ ID NO: 7205 - DNA, 1263 bp, Shigella sonnei
  misc_feature (217)..(217): n is a, c, g or t
atgagttttgcgaccatttctgttatcggactgggttacatcgggctgcctacagcagcagcgtttgcctcacggcaaaaacaggtgattggtgtcgatatcaaccaacacgcggttgataccatcaatcgtggcgaaatccatatcgtcgagcctgatttggcgagcgtagtaaaaactgccgtagaaggcggttttttacgagcgagcacgacgncagttgaagcggatgcctggctgattgctgtacccacgccgtttaaaggcgatcatgagccagatatgacctacgttgaatcggctgctcgctccattgcgccagtgctgaaaaaaggcgcgctggtgatccttgaatccacctcgccggtggggtcaaccgagaagatggcagaatggttagcagagatgcgtccggatctcactttcccacagcaggtgggcgagcaggcggacgtcaacattgcttactgcccggaacgcgtgttaccgggccaggttatggtcgagctgattaaaaacgatcgcgtgattggtggtatgacgccggtttgttcgacccgcgccagcgaactgtacaaaattttcctcgaaggtgagtgtgtcgtcactaactcgcggacggcggaaatgtgtaagctcaccgaaaacagcttccgcgatgtgaatatcgcttttgctaatgaattgtcgctgatttgtgccgatcaggggattaacgtctgggaactgattcgcctggcgaatcgtcaccctcgcgttaatattcttcagcctggccctggcgtgggcggtcactgcattgctgttgatccgtggtttatcgtggcacagaacccccagcaggcgcggcttatccgtaccgcgcgcgaagtgaacgatcacaaaccgttctgggttatcgatcaggtgaaagcggcggtggctgattgcctggcggctaccgataaacgcgccagtgaactgaaaatcgcctgctttggtctggcgtttaaaccgaatattgatgacctgcgcgaaagcccggcgatggaaatcgctgaactgatcgcccagtggcatagcggcgaaactctggttgttgagcctaacatccaccagttgccgaaaaaactgaccgggctttgtactctggcgcagcttgacgaggcgctggcaacggcagacgtgctggtgatgctggtcgatcatagtcagtttaaagttatcaatggcgacaatgtccatcagcagtatgtcgtcgatgccaaaggagtctggcgctga

SEQ ID NO: 7206 - protein, 420 aa, Shigella sonnei
  misc_feature (73)..(73): Xaa can be any naturally occurring amino acid
MSFATISVIGLGYIGLPTAAAFASRQKQVIGVDINQHAVDTINRGEIHIVEPDLASVVKTAVEGGFLRASTTXVEADAWLIAVPTPFKGDHEPDMTYVESAARSIAPVLKKGALVILESTSPVGSTEKMAEWLAEMRPDLTFPQQVGEQADVNIAYCPERVLPGQVMVELIKNDRVIGGMTPVCSTRASELYKIFLEGECVVTNSRTAEMCKLTENSFRDVNIAFANELSLICADQGINVWELIRLANRHPRVNILQPGPGVGGHCIAVDPWFIVAQNPQQARLIRTAREVNDHKPFWVIDQVKAAVADCLAATDKRASELKIACFGLAFKPNIDDLRESPAMEIAELIAQWHSGETLVVEPNIHQLPKKLTGLCTLAQLDEALATADVLVMLVDHSQFKVINGDNVHQQYVVDAKGVWR

SEQ ID NO: 7207 - DNA, 429 bp, Shigella sonnei
  misc_feature (23)..(23): n is a, c, g or t
atggccagagcgcgtggacgagntcgtcgcgatctcaagtccgaaatcaacattgtaccgttgctggacgtactgctggtgctgttgctgatctttatggcgacagcgcccatcatcacccagagcgtggaggtcgatctgccagacgctactgaatcacaggcggtgagcagtaacgataatccgccagtgattgttgaagtgtctggtattggtcagtacaccgtggtggttgagaaagatcgcctggagcgtttaccaccagagcaggtggtggcggaagtgtccagccgtttcaaggccaacccgaaaacggtctttctgatcggtggcgcaaaagatgtgccttacgatgaaataattaaagcactgaacttgttacatagtgcgggtgtgaaatcggttggtttaatgacgcagcctatctaa

SEQ ID NO: 7208 - protein, 142 aa, Shigella sonnei
  misc_feature (8)..(8): Xaa can be any naturally occurring amino acid
MARARGRXRRDLKSEINIVPLLDVLLVLLLIFMATAPIITQSVEVDLPDATESQAVSSNDNPPVIVEVSGIGQYTVVVEKDRLERLPPEQVVAEVSSRFKANPKTVFLIGGAKDVPYDEIIKALNLLHSAGVKSVGLMTQPI

SEQ ID NO: 7209 - DNA, 1482 bp, Shigella sonnei
  misc_feature (1135)..(1135): n is a, c, g or t
atgaataaacacgcatcacaaccgcgcactatttactatgtcgttgcgctgcaaatctgggaatattttagcttttacggcatgcgtgccctgctgattctctatctcaccaatcaactaaaatacaacgatactcacgcctacgagttatttagcgcctactgttcgctggtgtatgtcacgccaatcctcggtggctttttggcggataaagttctcggcaatcgcatggcggtgatgctgggggcgttgttgatggcgatcggtcatgtggtgctgggtgccagtgagatccatccgtcattcctctatctgtccctggcgattatcgtttgtggctatggtctgtttaaatccaatgtcagttgcctgctcggcgagctgtatgagccaaccgatccgcgtcgtgatggcggtttctcgctgatgtatgcagcgggtaacgtggggtctattatcgcacctatcgcctgtggttacgcccaggaagagtacagctgggcgatgggctttggcctggcggcggtgggtatgatcgcgggtctggtcattttcttatgtggcaatcgtcatttcacacatacccgcggcgttaataaaaaagtactgcgtgcaacaaactttctcctgcctaactggggatggctgctggttctgctggtggcaacgcctgcgctgattaccgtactgttctggaaagagtggtcggtatacgccttaattgtcgcgactattattggcctgggtgtactggcaaaaatttatcgcaaagcagaaaaccagaaacagcgtaaggagctggggctgattgtgacgctcaccttcttcagtatgttgttctgggccttcgcacaacagggcggcagctcaattagcctttatatcgaccgcttcgttaaccgcgatatgtttggttataccgttccgactgctatgttccagtcgattaatgccttcgcagttatgctatgcggtgtgttcctggcgtgggtggttaaagaaagcgtcgcaggtaatcgtaccgtgcgcatctggggaaaatttgctcttggccttggcctgatgagcgccggattctgcattctgaccttaagcgcccgctggtccgcaatgtatggtcactcttctctgccantgatggtgttaggcctcgcggtgatgggctttgcggaactgtttatcgacccggttgccatgtcgcaaattacgcgcattgaaattccgggcgtgaccggcgtattaaccggcatctacatgctgctttctggcgcgatcgcgaactatctggcgggcgtgattgccgatcagacatcgcaggcttcgtttgatgcttccggggcgatcaactactccatcaatgcatatattgaagtatttgatcaaattacctggggcgcactggcgtgtgtaggactggtactgatgatttggctgtatcaggcgctgaaattcagaaaccgcgcgctggcgctggagtcataa

SEQ ID NO: 7210 - protein, 493 aa, Shigella sonnei
  misc_feature (379)..(379): Xaa can be any naturally occurring amino acid
MNKHASQPRTIYYVVALQIWEYFSFYGMRALLILYLTNQLKYNDTHAYELFSAYCSLVYVTPILGGFLADKVLGNRMAVMLGALLMAIGHVVLGASEIHPSFLYLSLAIIVCGYGLFKSNVSCLLGELYEPTDPRRDGGFSLMYAAGNVGSIIAPIACGYAQEEYSWAMGFGLAAVGMIAGLVIFLCGNRHFTHTRGVNKKVLRATNFLLPNWGWLLVLLVATPALITVLFWKEWSVYALIVATIIGLGVLAKIYRKAENQKQRKELGLIVTLTFFSMLFWAFAQQGGSSISLYIDRFVNRDMFGYTVPTAMFQSINAFAVMLCGVFLAWVVKESVAGNRTVRIWGKFALGLGLMSAGFCILTLSARWSAMYGHSSLPXMVLGLAVMGFAELFIDPVAMSQITRIEIPGVTGVLTGIYMLLSGAIANYLAGVIADQTSQASFDASGAINYSINAYIEVFDQITWGALACVGLVLMIWLYQALKFRNRALALES

SEQ ID NO: 7211 - DNA, 1686 bp, Shigella sonnei
  misc_feature (104)..(104): n is a, c, g or t
gtgaatataaacgtcgccgaattgttaaatgggaattacattctgttattatttgtggtcctcgcgcttgggctatgtctcggaaagttacgacttggttcganccaactgggtaattccattggcgttttagtcgtatcgctgttattaggccaacaacatttcagcattaacaccgatgcgcttaatcttggctttatgctgtttattttctgcgtcggggtcgaagccggaccgaactttttttccattttttttcgcgatgggaaaaattacctaatgttagcactggtgatggttggcagtgcgctggtgatcgccttagggttaggtaagctgtttggctgggatattggcctgacggccggtatgttagcaggctctatgacgtcgacaccggttctggtcggtgctggcgatacactgcgtcattccggcatggaaagcaggcagctctcactggcactggataatctgagcctcgggtatgccttaacctatttaatcggtctggtgagtttgattgttggtgcgcgttacttgccgaaattgcagcatcaggacttacagaccagcgcccagcaaatcgcccgcgaacgtggcctggacactgatgccaaccgtaaggtttatttaccggtgatccgcgcctatcgcgtcggcccggagctggtggcctggaccgacggcaaaaatctgcgtgaactgggtatttatcgacaaaccggctgctacattgaacgtattcgacgtaacgggattctggcaaatccagacggtgatgccgtgctacaaatgggcgatgaaatagcgttggtaggctatcccgacgcccatgcccgactcgatcccagcttccgtaacggtaaagaagttttcgatcgtgaccttctcgacatgcgtatcgtcactgaagaagtggtcgttaaaaaccataacgctgtaggtaaacgtctcgcacaactgaagttgaccgatcacggttgcttccttaaccgcgtcattcgtagccagattgagatgccgatagatgacaacgtcgtgcttaacaaaggtgacgttttacaagtcagcggtgatgcccgtcgcgtaaaaaccatcgccgatcgcatcggctttatctcgattcacagccaggtcactgacctgctggcattttgcgccttctttgttattgggctgatgatcgggatgatcaccttccagttcagcacattcagtttcggcatggggaacgctgccgggttgttattcgccggaattatgctgggctttatgcgtgctaaccacccgaccttcggttacattccgcaaggtgcattaagcatggtgaaagagttcggcttgatggtgtttatggcaggcgttggtctgagcgccggtagcggtattaataacggcctgggcgcgattggcggtcagatgttgattgccggattaattgtcagtcttgtgcccgtggttatctgtttcttgttcggtgcttatgtattgcgaatgaaccgcgcactgttgttcggcgcaatgatgggcgcacgcacctgcgcgccggcaatggagatcatcagtgatacagctcgcagtaacatccctgcgctgggctatgcgggcacctacgcaatcgccaacgtcctgctgacgctggcagggacaatcatcgtcatggtatggccaggattaggataa

SEQ ID NO: 7212 - protein, 561 aa, Shigella sonnei
  misc_feature (35)..(35): Xaa can be any naturally occurring amino acid
MNINVAELLNGNYILLLFVVLALGLCLGKLRLGSXQLGNSIGVLVVSLLLGQQHFSINTDALNLGFMLFIFCVGVEAGPNFFSIFFRDGKNYLMLALVMVGSALVIALGLGKLFGWDIGLTAGMLAGSMTSTPVLVGAGDTLRHSGMESRQLSLALDNLSLGYALTYLIGLVSLIVGARYLPKLQHQDLQTSAQQIARERGLDTDANRKVYLPVIRAYRVGPELVAWTDGKNLRELGIYRQTGCYIERIRRNGILANPDGDAVLQMGDEIALVGYPDAHARLDPSFRNGKEVFDRDLLDMRIVTEEVVVKNHNAVGKRLAQLKLTDHGCFLNRVIRSQIEMPIDDNVVLNKGDVLQVSGDARRVKTIADRIGFISIHSQVTDLLAFCAFFVIGLMIGMITFQFSTFSFGMGNAAGLLFAGIMLGFMRANHPTFGYIPQGALSMVKEFGLMVFMAGVGLSAGSGINNGLGAIGGQMLIAGLIVSLVPVVICFLFGAYVLRMNRALLFGAMMGARTCAPAMEIISDTARSNIPALGYAGTYAIANVLLTLAGTIIVMVWPGLG

SEQ ID NO: 7213 - DNA, 1584 bp, Shigella sonnei
  misc_feature (526)..(526): n is a, c, g or t
atgaatttaaccctcaaagaatcgcttgttacccgtagccgggtatttagcccgtggactgcgttctactttttacagtcgctattaattaacctcggcttaggttaccccttcagtttgctctacaccgctgcgtttacggctattttgcttttgctatggcgaacattgcctcgcgtacaaaaagttctggtcggtgtcagttcgctggtggcggcttgttatttcccttttgctcaggcctacggcgcgcctaatttcaatacattgctggcattgcactccaccaatatggaagagtcgaccgaaatcctgacgatttttccgtggtacagctacctggtcggcttatttatttttgcgctcggcgtaatagcaatcaggcgaaaaaaagagaatgaaaaagcgcgctggaataccttcgacagcctgtgtctggtattcagtgtggcgacattttttgttgctcccgtgcaaaacctggcctggggtggcgtatttaaactgaaagatactggctatccgntatttcgttttgctaaggatgtcatcgtcaataataacgaggtgattgaagagcaagaacggatggcaaaactttccggaatgaaagatacctggacggtcactgccgttaagccgaagtatcagacctatgtggtggtgatcggcgaaagcgcgcgtcgcgatgccctcggtgcctttggcggtcactgggacaataccccgtttgccagcagcgttaacggtttgatatttgctgactacattgccgccagtggctccacgcagaaatcacttggcttaacgctcaatcgcgtagtcgatggcaaaccacagtttcaggataactttgtcaccctggcaaatcgcgcgggcttccagacctggtggttttccaaccagggccaaatcggcgaatacgatactgctatcgccagcatcgccaaacgtgcagatgaagtgtacttcctgaaagaaggtaattttgaagcagataaaaacacgaaagacgaagcgttactggatatgaccgctcaagtgctggcgcaagagcactcgcaaccgcagctgattgttctgcatctgatgggctcgcatccgcaggcctgcgacaggacacaaggcaaatacgaaacctttgtgcaatcgaaagaaacgtcgtgctatctctataccatgacgcaaacggacgatttactgcgcaagctgtacgatcagttacgcaacagcggcagcagcttctctctggtttacttttctgaccacggtctggcctttaaagagcgcggcaaagacgtgcaataccttgcccatgatgataaatatcagcaaaatttccaggtgccttttatggtcatttccagcgacgataaagcgcatcgggtgattaaagcccgccgctcagccaatgacttcttaggctttttctcgcagtggacgggaattaaagcgaaggaaataaatatcaaatacccgtttatatctgagaagaaagccgggccgatatacatcaccaacttccagttacagaaggtggattacaaccatctcggaaccgatattttcgacccgaaaccttaa

SEQ ID NO: 7214 - protein, 527 aa, Shigella sonnei
  misc_feature (176)..(176): Xaa can be any naturally occurring amino acid
MNLTLKESLVTRSRVFSPWTAFYFLQSLLINLGLGYPFSLLYTAAFTAILLLLWRTLPRVQKVLVGVSSLVAACYFPFAQAYGAPNFNTLLALHSTNMEESTEILTIFPWYSYLVGLFIFALGVIAIRRKKENEKARWNTFDSLCLVFSVATFFVAPVQNLAWGGVFKLKDTGYPXFRFAKDVIVNNNEVIEEQERMAKLSGMKDTWTVTAVKPKYQTYVVVIGESARRDALGAFGGHWDNTPFASSVNGLIFADYIAASGSTQKSLGLTLNRVVDGKPQFQDNFVTLANRAGFQTWWFSNQGQIGEYDTAIASIAKRADEVYFLKEGNFEADKNTKDEALLDMTAQVLAQEHSQPQLIVLHLMGSHPQACDRTQGKYETFVQSKETSCYLYTMTQTDDLLRKLYDQLRNSGSSFSLVYFSDHGLAFKERGKDVQYLAHDDKYQQNFQVPFMVISSDDKAHRVIKARRSANDFLGFFSQWTGIKAKEINIKYPFISEKKAGPIYITNFQLQKVDYNHLGTDIFDPKP

SEQ ID NO: 7215 - DNA, 3684 bp, Shigella sonnei
  misc_feature (1226)..(1226): n is a, c, g or t
gtgagcagcaaagtggaacaactgcgtgcgcagttaaatgaacgtattctggtgctggacggcggtatgggcaccatgatccagagctatcgactgaacgaagccgattttcgtggtgaacgctttgccgactggccatgcgacctcaaaggcaacaacgacctgctggtactcagtaaaccggaagtgatcgccgctatccacaacgcctactttgaagcgggcgcggatatcatcgaaaccaacaccttcaactccacgaccattgcgatggcggattaccagatggaatccctgtcggcggaaatcaactttgcggcggcgaaactggcgcgcgcctgtgctgacgagtggaccgcgcgcacgccggagaaaccgcgctacgttgccggtgttctcggcccaaccaaccgcacggcgtctatttctccggacgtcaacgatccggcatttcgtaatatcacttttgacgggctggtggtggcttatcgagagtccaccaaagcgctggtggaaggtggtgcggatctgatcctgattgaaaccgttttcgacacccttaacgccaaagcggcggtatttgcggtaaaaacggagtttgaaacgctgggcgttgagctgccgattatgatctctggcaccatcaccgacgcctccgggcgcacgctctccgggcagaccaccgaagcattttacaactcattgcgccacgccgaagcgctgacctttggcctgaactgtgcgctggggcccgatgaactgcgccagtacgtgcaggagctgtcacggattgcggaatgctacgtcaccgcgcacccgaacgccgggctacccaacgcctttggtgagtacgatctcgacgccgacacgatggcaaaacaaatacgtgaatgggcggaagcgggctttctcaatatcgtcggcggctgctgtggcaccacgccacaacatattgcagcgatgagtcgtgcagtagaaggattagcgccgcgcaaactgccggaaatccccgtagcctgccgtttgtccggcctggagccgctgaacattggcgaagatagcctgtttgtgaacgtgggtgaacgcaccaacgtcaccggttccgctaagttcaagcgcctgatcaaagaagagaaatacagcgaggcactggatgtggcccgccagcaggtggaaaacggcgcgcagattatcgatatcaatatggatgaagggatgctcgacgncgaagcggcgatggtgcgttttctcaatctgattgccggtgaaccggatatcgctcgcgtgccgattatgatcgactcctcaaaatgggaggtcatcgaaaaggggctgaagtgtattcagggcaaaggcattgttaactctatctcaatgaaagagggcgtcgacgcctttatccatcatgcgaaactgttgcgtcgttacggtgcagcggtggtggtaatggcctttgacgaacagggacaggccgatacccgcgcacggaaaatcgagatttgccgtcgggcgtacaaaatcctcaccgaagaggttggcttcccgccagaagatatcatcttcgacccgaacatcttcgcggtcgccaccggcattgaagagcacaacaactatgcgcaggactttatcggcgcctgcgaagacatcaaacgcgaactgccgcacgcgctgatttccggcggcgtatctaacgtttctttctcattccgtggcaacgaaccggtgcgcgaagccattcacgcggtgttcctctactacgctattcgcaatggcatggatatggggatcgtcaacgccgggcaactggcgatttacgacgacctgcccgctgaactgcgcgacgcggtggaagatgtgattcttaatcgtcgcgatgatggcactgaacgtttactggagcttgccgagaaatatcgcggcagcaaaaccgacgacaccgctaacgcccagcaggcggagtggcgctcgtgggaagtgaataaacgtctggaatactcgctggtcaaaggcattactgagtttatcgagcaggataccgaagaagcccgccagcaggctacgcgcccgattgaagtgattgaaggcccgttgatggacggcatgaacgtggtcggcgatctgtttggcgaggggaaaatgttcctgccacaggtggtcaaatcggcgcgcgtcatgaaacaggcagtggcctacctcgaaccgtttattgaagccagcaaagagcagggcaaaaccaacggcaagatggtgatcgccaccgtgaagggcgacgtccacgacatcggtaaaaatatcgttggtgtggtgctgcaatgtaacaactacgaaattgtcgatctcggcgttatggtgcctgcggaaaaaattctccgtaccgctaaagaagtgaatgctgatctgattggactttcggggcttatcacgccgtcgctggacgagatggttaacgtggcgaaagagatggagcgtcagggcttcaccattccgttactgatcggtggcgcgacgacctcaaaagcgcacacggcggtgaaaattgagcagaactacagcggcccgacggtgtatgtgcagaatgcctcgcgcaccgttggtgtggtggcggcgctgctttccgatactcagcgcgatgattttgtcgctcgtacccgcaaggagtatgaaaccgtacgtattcagcacgggcgcaagaaaccgcgcacaccaccggtcacgctggaagcggcgcgcgataacgacttcgcttttgactggcaggcttacacgccgccggtggcgcaccgtctcggcgtgcaggaagttgaagccagcatcgaaactctgcgtaattacatcgactggacaccgttctttatgacctggtcgctggccgggaagtatccgcgcattctggaagatgaagtggtgggcgttgaggcgcagcggctgtttaaagacgccaacgacatgctggataaattaagcgccgagaaaacgctgaatccgcgtggcgtggtgggcttgttcccggcaaaccgtgtgggcgatgacattgaaatctaccgtgacgaaacgcgcacccatgtgatcaacgtcagccaccatctgcgtcaacagaccgaaaaaacgggattcgctaactactgcctcgctgacttcgttgcgccgaagctttctggtaaagcagattacatcggcgcatttgccgtgactggcgggctggaagaggacgcactggctgatgcctttgaagcgcagcacgatgattacaacaaaatcatggtgaaagcgcttgccgaccgtttagccgaagcctttgcggagtatctccatgagcgtgtgcgtaaagtctactggggctatgcgccgaacgagaacctcagcaacgaagaactgatccgcgaaaactaccagggcatccgtccggcaccgggctacccggcctgcccggaacatacggaaaaagccaccatctgggagctgctggaagtggaaaaacatactggcatgaaactcacagaatctttcgccatgtggcctggtgcatcggtttcgggttggtatttcagccacccggacagcaagtactacgcggtggcgcaaattcagcgcgatcaggttgaagactatgcccgccgtaaaggtatgagcgtctccgatgttgagcgctggctggcaccgaatctggggtatgacgcggactga

SEQ ID NO: 7216 - protein, 1227 aa, Shigella sonnei
  misc_feature (409)..(409): Xaa can be any naturally occurring amino acid
MSSKVEQLRAQLNERILVLDGGMGTMIQSYRLNEADFRGERFADWPCDLKGNNDLLVLSKPEVIAAIHNAYFEAGADIIETNTFNSTTIAMADYQMESLSAEINFAAAKLARACADEWTARTPEKPRYVAGVLGPTNRTASISPDVNDPAFRNITFDGLVVAYRESTKALVEGGADLILIETVFDTLNAKAAVFAVKTEFETLGVELPIMISGTITDASGRTLSGQTTEAFYNSLRHAEALTFGLNCALGPDELRQYVQELSRIAECYVTAHPNAGLPNAFGEYDLDADTMAKQIREWAEAGFLNIVGGCCGTTPQHIAAMSRAVEGLAPRKLPEIPVACRLSGLEPLNIGEDSLFVNVGERTNVTGSAKFKRLIKEEKYSEALDVARQQVENGAQIIDINMDEGMLDXEAAMVRFLNLIAGEPDIARVPIMIDSSKWEVIEKGLKCIQGKGIVNSISMKEGVDAFIHHAKLLRRYGAAVVVMAFDEQGQADTRARKIEICRRAYKILTEEVGFPPEDIIFDPNIFAVATGIEEHNNYAQDFIGACEDIKRELPHALISGGVSNVSFSFRGNEPVREAIHAVFLYYAIRNGMDMGIVNAGQLAIYDDLPAELRDAVEDVILNRRDDGTERLLELAEKYRGSKTDDTANAQQAEWRSWEVNKRLEYSLVKGITEFIEQDTEEARQQATRPIEVIEGPLMDGMNVVGDLFGEGKMFLPQVVKSARVMKQAVAYLEPFIEASKEQGKTNGKMVIATVKGDVHDIGKNIVGVVLQCNNYEIVDLGVMVPAEKILRTAKEVNADLIGLSGLITPSLDEMVNVAKEMERQGFTIPLLIGGATTSKAHTAVKIEQNYSGPTVYVQNASRTVGVVAALLSDTQRDDFVARTRKEYETVRIQHGRKKPRTPPVTLEAARDNDFAFDWQAYTPPVAHRLGVQEVEASIETLRNYIDWTPFFMTWSLAGKYPRILEDEVVGVEAQRLFKDANDMLDKLSAEKTLNPRGVVGLFPANRVGDDIEIYRDETRTHVINVSHHLRQQTEKTGFANYCLADFVAPKLSGKADYIGAFAVTGGLEEDALADAFEAQHDDYNKIMVKALADRLAEAFAEYLHERVRKVYWGYAPNENLSNEELIRENYQGIRPAPGYPACPEHTEKATIWELLEVEKHTGMKLTESFAMWPGASVSGWYFSHPDSKYYAVAQIQRDQVEDYARRKGMSVSDVERWLAPNLGYDAD

SEQ ID NO: 7217 - DNA, 1365 bp, Shigella sonnei
  misc_feature (266)..(266): n is a, c, g or t
atgtctttcgattatttgggtttaagccctgatatcctgcgcgccgttgccgagcagggttaccgtgaacccacccctattcagcagcaggcgatccctgcggtgctggaaggccgcgacctgatggctagcgcccagaccggcaccggcaaaacagcgggctttacgctgccgctgttgcaacacctgatcactcgccagccgcacgccaaagggcgtcgtccggtacgtgcgctcattcttaccccgacccgtgaactggcggngcagattggcgaaaacgtccgtgattacagcaaatacctgaacattcgttcgctggtggtgtttggtggtgtgagtattaacccgcagatgatgaaactgcgtggcggcgttgatgtgctggtggcaacgccgggacgtttgctggacctggaacatcagaatgcagtgaagctggatcaggttgaaatcctcgtcctcgatgaagctgaccgcatgctcgacatgggctttatccacgatatccgtcgcgtgttaacaaaactacctgcgaagcgccagaacctgttattctccgcgaccttctctgacgatattaaagccctggcggaaaaactgttgcacaacccgctggaaatcgaagtggcacgccgcaataccgcgtctgatcaggtgacccagcacgttcactttgtcgataagaaacgcaaacgcgaattgctgtcgcacatgattgggaaagggaactggcagcaggtgctggtgtttacccgtaccaaacacggcgctaaccatctggctgaacagctcaataaagatggcatccgtagtgcggcgatccacggcaataaatcgcaaggtgcgcgtactcgtgcgctggctgattttaaatcgggcgatattcgtgtactggtggcaactgacatcgctgcgcgcggcctggatattgaagagctgccgcacgtcgtcaactatgaactgccaaacgtaccggaagattatgtccatcgtatcgggcgtaccggtcgtgcggctgctaccggtgaagcgttgtcgctggtgtgtgttgatgaacacaaactgctgcgtgatatcgaaaaactgctgaaaaaagagatcccgcgcattgcgattccgggctatgagccggacccgtcaatcaaagccgaaccgatccagaacggtcgccagcaacgtggcggcggcggtcgtgggcaaggtggtggtcgcggtcaacagcaaccacgccgtggggaaggtggcgcaaaatctgcaagcgcgaaacctgcagaaaaaccgtctcgccgcctcggcgatgccaaaccggcaggcgaacaacaacgtcgccgccgtccgcgtaaacctgccgctgcgcagtaa

SEQ ID NO: 7218 - protein, 454 aa, Shigella sonnei
  misc_feature (89)..(89): Xaa can be any naturally occurring amino acid
MSFDYLGLSPDILRAVAEQGYREPTPIQQQAIPAVLEGRDLMASAQTGTGKTAGFTLPLLQHLITRQPHAKGRRPVRALILTPTRELAXQIGENVRDYSKYLNIRSLVVFGGVSINPQMMKLRGGVDVLVATPGRLLDLEHQNAVKLDQVEILVLDEADRMLDMGFIHDIRRVLTKLPAKRQNLLFSATFSDDIKALAEKLLHNPLEIEVARRNTASDQVTQHVHFVDKKRKRELLSHMIGKGNWQQVLVFTRTKHGANHLAEQLNKDGIRSAAIHGNKSQGARTRALADFKSGDIRVLVATDIAARGLDIEELPHVVNYELPNVPEDYVHRIGRTGRAAATGEALSLVCVDEHKLLRDIEKLLKKEIPRIAIPGYEPDPSIKAEPIQNGRQQRGGGGRGQGGGRGQQQPRRGEGGAKSASAKPAEKPSRRLGDAKPAGEQQRRRRPRKPAAAQ

SEQ ID NO: 7219 - DNA, 1209 bp, Shigella sonnei
  misc_feature (557)..(557): n is a, c, g or t
atgaatgaatttccggttgttttggttattaactgtggttcgtcttcgattaagttttccgtgctcgatgccagcgactgtgaagtattaatgtcaggtattgccgacggtattaactcggaaaatgcattcttatccgtaaatgggggagagccagcaccgctggctcaccacagctacgaaggtgcattgaaggcaattgcatttgaactggaaaaacggaatttaaatgacagtgtggccttaattggccaccgcatcgctcacggcggcagtatttttaccgagtccgccattattaccgatgaagtcattgataatatccgtcgcgtttctccactggcacccctgcataattacgccaatttaagtggtattgaatcggcgcagcaattatttccgggcgtaactcaggtggcggtatttgataccagtttccaccagacgatggctccggaagcttatttatacggcctgccgtggaaatattatgaagagttaggtgtacgccgttatggtttccacggcacgtcgcaccgctatgtttcccagcgcgnacattctctgctgaatctggcggaagatgactccggcctggttgtggcgcatcttggcaatggcgcgtcaatctgcgcggttcgcaacggtcagagtgttgatacttcaatgggaatgacgccgctggaaggcttgatgatgggaacccgcagtggcgatgtcgactttggtgcgatgtcctgggtcgccagccaaaccaaccagagcctgggtgacctggaacgcgtagtgaataaagagtcgggattattaggtatttccggtctttcttcggatttacgtgttctggaaaaagcctggcatgaaggtcacgaacgcgcgcaactggcaattaaaacctttgttcaccgaattgcccgtcatattgccggacacgcagcttcattacgtcgcctggatggaattatattcaccggcggaataggagagaattcaagtttaattcgtcgtctggtcatggaacatttggctgtattaggcgtagtgattgatacagaaatgaataatcgctctaactcttttggagagcgaattgtttccagtgaaaatgcgcgtgtcatttgtgccgttattccgactaacgaagaaaaaatgattgctttggatgccattcatttaggcaaagttaacgcgcccgcagaatttgcataa

SEQ ID NO: 7220 - protein, 402 aa, Shigella sonnei
  misc_feature (186)..(186): Xaa can be any naturally occurring amino acid
MNEFPVVLVINCGSSSIKFSVLDASDCEVLMSGIADGINSENAFLSVNGGEPAPLAHHSYEGALKAIAFELEKRNLNDSVALIGHRIAHGGSIFTESAIITDEVIDNIRRVSPLAPLHNYANLSGIESAQQLFPGVTQVAVFDTSFHQTMAPEAYLYGLPWKYYEELGVRRYGFHGTSHRYVSQRXHSLLNLAEDDSGLVVAHLGNGASICAVRNGQSVDTSMGMTPLEGLMMGTRSGDVDFGAMSWVASQTNQSLGDLERVVNKESGLLGISGLSSDLRVLEKAWHEGHERAQLAIKTFVHRIARHIAGHAASLRRLDGIIFTGGIGENSSLIRRLVMEHLAVLGVVIDTEMNNRSNSFGERIVSSENARVICAVIPTNEEKMIALDAIHLGKVNAPAEFA

SEQ ID NO: 7221 - DNA, 315 bp, Shigella sonnei
  misc_feature (182)..(182): n is a, c, g or t
atgttgctgattgtgcctaacaacggggcaatccataactttgatgatgaagcgatggtcgagatcccgtgtctggtcgggcacaacggaccagaaccactggtggtcggcgatatcccgcagtttcagaaagggttaatgagtcagcaagtggcggtggaaaaactggtcgtggacgcctnggaacagcgttcatatcagcacctgtggcaggcgattacgttatcgaaaacggtaccgagcgcctcggtcgccaaagctattctggatgagttgctggaggccaacaaagcgtactggccagagttacgttaa

SEQ ID NO: 7222 - protein, 104 aa, Shigella sonnei
  misc_feature (61)..(61): Xaa can be any naturally occurring amino acid
MLLIVPNNGAIHNFDDEAMVEIPCLVGHNGPEPLVVGDIPQFQKGLMSQQVAVEKLVVDAXEQRSYQHLWQAITLSKTVPSASVAKAILDELLEANKAYWPELR

SEQ ID NO: 7223 - DNA, 951 bp, Shigella sonnei
  misc_feature (252)..(252): n is a, c, g or t
atgtatcgcgccggattttatcgtggcggtccaatcctgatgagcgccattgccgggatcgaccaggcgttatgggatatcaaaggtaaagtgctgaatgcgtcggtctggcaactgatgggcggcctggttcgcgacaaaattaaagcctacagttgggtcggcggcgatcgtccggcggatgtgatcgacggtattaaaaccctgcgcgaaatcggcttcgataccttcaaactgaacggttgtgaaganctggggctaattgataactcccgcgcggtagatgcggcagtcaacaccgtggcacaaattcgtgaagcttttggcaatcagattgagtttggtcttgatttccacggtcgcgtcagcgcgccaatggcgaaagtgctgattaaagaactggagccgtatcgcccgctgtttattgaagagccggtgctggcggaacaagccgaatactacccgaaattggcggcacaaacgcatattccactggcggcgggtgagcgcatgttctcacgtttcgattttaaacgcgtgctggaggcaggcggtatttcgattctacaaccggatctctcccatgcaggcggtattaccgaatgctacaaaattgccggaatggcagaagcctatgacgtgacccttgcgccgcactgtccgctcggaccgattgcactggcggcttgtctgcatatcgactttgtttcctataacgcggtacttcaggaacaaagtatgggaattcattacaacaaaggcgcggagttactcgactttgtgaaaaacaaagaagacttcagcatggttggcggcttctttaaaccgctaacgaaaccgggcttaggcgtggaaatcgacgaagctaaagttattgagttcagtaaaaatgccccggactggcgtaatccactctggcgtcatgaagataacagcgtagcagagtggtaa

SEQ ID NO: 7224 - protein, 316 aa, Shigella sonnei
  misc_feature (84)..(84): Xaa can be any naturally occurring amino acid
MYRAGFYRGGPILMSAIAGIDQALWDIKGKVLNASVWQLMGGLVRDKIKAYSWVGGDRPADVIDGIKTLREIGFDTFKLNGCEXLGLIDNSRAVDAAVNTVAQIREAFGNQIEFGLDFHGRVSAPMAKVLIKELEPYRPLFIEEPVLAEQAEYYPKLAAQTHIPLAAGERMFSRFDFKRVLEAGGISILQPDLSHAGGITECYKIAGMAEAYDVTLAPHCPLGPIALAACLHIDFVSYNAVLQEQSMGIHYNKGAELLDFVKNKEDFSMVGGFFKPLTKPGLGVEIDEAKVIEFSKNAPDWRNPLWRHEDNSVAEW

SEQ ID NO: 7225 - DNA, 801 bp, Escherichia coli
  misc_feature (202)..(202): n is a, c, g or t
gtggcgacagattgccagcgtgagcaactgagctatgtcattggcactgaagttccggttccgggcggtgaggccagcgccattcagtcagtacacatcacccatgttgaagatgccgccaatactttacgtacgcatcaaaaggcctttattgcccgtgggctgacagaggcgttaacacgcgtgattgccatcgtggtgnagccgggcgtggaatttgatcacagcaatattatccattatcagccgcaggaagcgcagccgctggcgcaatggatagaaaacacccgaatggtttatgaagcacattctaccgattaccagacccggacggcttattgggaattagtccgcgatcactttgcaatattgaaagtcggtcccgcattaacctttgctttacgcgaggcgatatttgcactggcacaaattgagcaggaacttatcgcccctgaaaatcgcagcggttgcctggcggtaattgaagaagtgatgctcgacgaaccgcaatactggaaaaaatattatcgtacgggttttaacgattcattactggatattcgttacagcctgtcggatcgtattcgttattactggccgcatagtcggattaaaaatagcgtcgaaacgatgatggtgaatcttgaaggcgtggacatcccactgggcatgattagtcagtatcttcccaaacaatttgaacgcattcagtccggggaattatcagcaataccgcatcagctgattatggataaaatttatgatgttttgcgcgcctatcgctacggctgtgcggaataa

SEQ ID NO: 7226 - protein, 266 aa, Escherichia coli
  misc_feature (68)..(68): Xaa can be any naturally occurring amino acid
MATDCQREQLSYVIGTEVPVPGGEASAIQSVHITHVEDAANTLRTHQKAFIARGLTEALTRVIAIVVXPGVEFDHSNIIHYQPQEAQPLAQWIENTRMVYEAHSTDYQTRTAYWELVRDHFAILKVGPALTFALREAIFALAQIEQELIAPENRSGCLAVIEEVMLDEPQYWKKYYRTGFNDSLLDIRYSLSDRIRYYWPHSRIKNSVETMMVNLEGVDIPLGMISQYLPKQFERIQSGELSAIPHQLIMDKIYDVLRAYRYGCAE

SEQ ID NO: 7227 - DNA, 567 bp, Shigella sonnei
  misc_feature (430)..(430): n is a, c, g or t
gtgaacggtcatgctcacctgctctacgcgctcaatatcgccgtgagaaccgcgccggacagctcggttaaggcgctgaaatacgccgctgcgattgaacgttcgctgtgtgagaaactttgtgctgatgtgaactacagcggactgatttgtaaaaatccgttccacctggaatggcaggtgatggagtggcgagaggaagcctataccctcgatgaactggctgattatctcgatttgagcgcctcagcgcgccgtagcatcgataaacattacgggatggggcgaaactgccacctgttcgaaatgacgcgcaaatgggcttacagggcgattcgtcagggctggcccgaattctcacagtggcttgatgccgtgattcagcgtgtcgaaatgtacaacgcatcgcttcccgttccgctttcaccgnctgaatgtcgggctattggcaagagcattgcgaaatacacgcacaggaacttcacgccggaaactttcgcacagtatgtggctgatacgcacacattaacgtacgttttcgttccattggccctcaccccccgataa

SEQ ID NO: 7228 - protein, 188 aa, Shigella sonnei
  misc_feature (144)..(144): Xaa can be any naturally occurring amino acid
MNGHAHLLYALNIAVRTAPDSSVKALKYAAAIERSLCEKLCADVNYSGLICKNPFHLEWQVMEWREEAYTLDELADYLDLSASARRSIDKHYGMGRNCHLFEMTRKWAYRAIRQGWPEFSQWLDAVIQRVEMYNASLPVPLSPXECRAIGKSIAKYTHRNFTPETFAQYVADTHTLTYVFVPLALTPR

SEQ ID NO: 7229 - DNA, 567 bp, Shigella sonnei
  misc_feature (487)..(487): n is a, c, g or t
gtgaacggtcatgctcacctgctctacgcgctcaatatcgccgtgagaaccgcgccggacagctcggttaaggcgctgaaatacgccgctgcgattgaacgttcgctgtgtgagaaactttgtgctgatgtgaactacagcggactgatttgtaaaaatccgttccacctggaatggcaggtgatggagtggcgagaggaagcctataccctcgatgaactggctgattatctcgatttgagcgcctcagcgcgccgtagcatcgataaacattacgggatggggcgaaactgccacctgttcgaaatgacgcgcaaatgggcttacagggcgattcgtcagggctggcccgaattctcacagtggcttgatgccgtgattcagcgtgtcgaaatgtacaacgcatcgcttcccgttccgctttcaccgcctgaatgtcgggctattggcaagagcattgcgaaatacacgcacaggaacttcacgncggaaactttcgcacagtatgtggctgatacgcacacattaacgtacgttttcgttccattggccctcaccccccgataa

SEQ ID NO: 7230 - protein, 188 aa, Shigella sonnei
  misc_feature (163)..(163): Xaa can be any naturally occurring amino acid
MNGHAHLLYALNIAVRTAPDSSVKALKYAAAIERSLCEKLCADVNYSGLICKNPFHLEWQVMEWREEAYTLDELADYLDLSASARRSIDKHYGMGRNCHLFEMTRKWAYRAIRQGWPEFSQWLDAVIQRVEMYNASLPVPLSPPECRAIGKSIAKYTHRNFTXETFAQYVADTHTLTYVFVPLALTPR

SEQ ID NO: 7231 - DNA, 2628 bp, Citrobacter koseri
  misc_feature (248)..(248): n is a, c, g or t
atgagcgaccttgcgagagaaattacaccggtcaacattgaggaagagctgaagagctcctatctggattatgcgatgtcggtcattgttggccgtgcgctgccggatgtccgagatggcctgaagccggtacaccgtcgcgtactttacgccatgaacgtactaggcaatgactggaacaaagcctataaaaaatctgcccgtgtcgttggtgacgtaatcggtaaataccatccccatggtgactnggcggtttatgacacgatcgtccgtatggcgcagccattctcgctgcgttacatgctggtagacggtcagggtaacttcggttccatcgacggcgactctgcggcggcaatgcgttatacggaaatccgtctggcgaaaattgcccatgaactgatggccgatctcgaaaaagagacggtcgatttcgttgataactatgacggcacggaaaaaattccggacgtcatgccaaccaaaattcctaacctgctggtgaacggttcttccggtatcgccgtaggtatggcaaccaacatcccgccgcacaacctgacggaagtcatcaacggttgtctggcgtatatcgatgatgaagacatcagcattgaagggctgatggaacacatcccggggccggacttcccgacggcggcaatcattaacggtcgtcgcggtattgaagaagcttaccgtaccggtcgtggcaaggtgtacatccgcgcccgtgctgaagtggaagtcgacgccaaaaccgggcgtgaaaccattatcgtccacgaaattccgtatcaggtaaacaaagcgcgcctgatcgagaagattgcggaactggtaaaagaaaaacgcgtggaaggcatcagcgcgctgcgtgacgagtctgacaaagacggtatgcgcatcgtgattgaagttaaacgcgatgcggtcggtgaagttgtgctcaacaacctctactcccagacccagttgcaggtttctttcggtatcaacatggtggcattgcaccatggtcagccgaagatcatgaacctgaaagatatcatcgcggcgtttgttcgtcaccgccgtgaagtggtgacccgtcgtactattttcgaactgcgtaaagctcgcgatcgtgctcatatccttgaagcactagccgtggcgctggcgaacatcgacccgatcatcgaactgatccgtcatgcgccgacgcctgcagaagcgaaaactgcgctggtggctaatccgtggcagctgggcaacgttgccgcgatgctggaacgtgctggcgacgatgctgcgcgtccggaatggctggagccagagttcggcgtgcgtgatggtctgtactacctgaccgaacagcaagctcaggcgattctggatctgcgtttgcagaaactgaccggccttgagcacgaaaaactgctcgacgaatacaaagagctgctggatcagatcgcggaactgttgcgtattcttggtagcgccgatcgtctgatggaagtgatccgtgaagagctggagctggttcgtgaacagttcggtgacaaacgtcgtactgaaatcaccgccaacagcgcagacatcaacctggaagatctgatcacccaggaagatgtggtcgtgacgctctctcaccagggctatgttaaatatcagccgctttctgaatacgaagcgcagcgtcgtggcgggaaaggtaaatctgccgcacgtattaaagaagaagactttatcgaccgactgctggtggcaaacacgcacgaccatattctgtgcttctccagccgtggtcgcgtctattcgatgaaagtttaccagttgccggaggccactcgtggcgcgcgcggtcgtccgatcgtcaacctgctgccgctggagcaggacgaacgtatcaccgcgatcctgccagtgaccgagtttgaagaaggcgtgaaagtcttcatggcgaccgctaacggtactgtgaagaaaaccgtcctcaccgaattcaaccgtctgcgtaccgccggtaaagtggcgatcaaactggttgaaggcgatgagctgatcggcgttgacctgaccagcggcgaagacgaagtaatgctgttctccgccgaaggtaaagtggtgcgctttaaagagtcttctgtccgtgcgatgggctgcaacaccaccggtgttcgcggtattcgcttaggtgaaggcgataaagtcgtctctctgatcgtgcctcgtggcgatggcgcaatcctcaccgcaacgcaaaacggttacggtaaacgtaccgcagtggcggaatacccaaccaagtcgcgtgcgacgaaaggggttatctccatcaaggttaccgaacgtaacggtttagtggttggcgcggtacaggtagatgactgcgaccagatcatgatgatcaccgatgccggtacgctggtacgtactcgcgtttcagaaatcagcatcgtgggccgtaacacccagggcgtgatcctcatccgtactgcggaagatgaaaacgtagtgggtctgcaacgtgttgctgaaccggttgacgaggaagatctcgataccatcgacggcagtgccgcggaaggggacgatgaaatcgctccggaagtggacgttgacgacgagccagaagaagaataa

SEQ ID NO: 7232 - protein, 875 aa, Citrobacter koseri
  misc_feature (83)..(83): Xaa can be any naturally occurring amino acid
MSDLAREITPVNIEEELKSSYLDYAMSVIVGRALPDVRDGLKPVHRRVLYAMNVLGNDWNKAYKKSARVVGDVIGKYHPHGDXAVYDTIVRMAQPFSLRYMLVDGQGNFGSIDGDSAAAMRYTEIRLAKIAHELMADLEKETVDFVDNYDGTEKIPDVMPTKIPNLLVNGSSGIAVGMATNIPPHNLTEVINGCLAYIDDEDISIEGLMEHIPGPDFPTAAIINGRRGIEEAYRTGRGKVYIRARAEVEVDAKTGRETIIVHEIPYQVNKARLIEKIAELVKEKRVEGISALRDESDKDGMRIVIEVKRDAVGEVVLNNLYSQTQLQVSFGINMVALHHGQPKIMNLKDIIAAFVRHRREVVTRRTIFELRKARDRAHILEALAVALANIDPIIELIRHAPTPAEAKTALVANPWQLGNVAAMLERAGDDAARPEWLEPEFGVRDGLYYLTEQQAQAILDLRLQKLTGLEHEKLLDEYKELLDQIAELLRILGSADRLMEVIREELELVREQFGDKRRTEITANSADINLEDLITQEDVVVTLSHQGYVKYQPLSEYEAQRRGGKGKSAARIKEEDFIDRLLVANTHDHILCFSSRGRVYSMKVYQLPEATRGARGRPIVNLLPLEQDERITAILPVTEFEEGVKVFMATANGTVKKTVLTEFNRLRTAGKVAIKLVEGDELIGVDLTSGEDEVMLFSAEGKVVRFKESSVRAMGCNTTGVRGIRLGEGDKVVSLIVPRGDGAILTATQNGYGKRTAVAEYPTKSRATKGVISIKVTERNGLVVGAVQVDDCDQIMMITDAGTLVRTRVSEISIVGRNTQGVILIRTAEDENVVGLQRVAEPVDEEDLDTIDGSAAEGDDEIAPEVDVDDEPEEE

SEQ ID NO: 7233 - DNA, 1272 bp, Shigella sonnei
  misc_feature (554)..(554): n is a, c, g or t
atgtgccctttgccgtgtcacacctaccgtaaccagctggcgtttatcgatattttcttccggggaatgaataacaccaactacaacatggcggtctgtggcacctccggggccggtaaaaccgggctgatacagccacttatccgcagcgtgctggactccgggggctttgccgtggtgttcgacatgggggatggctacaagtccctgtgtgagaacatgggtggcgtatatctggacggtgaaaccctgcgttttaacccgtttgcgaacatcaccgatatcgaccagtcagcggagcgtgtccgtgaccagttgtcagtgatggccagccccaacggtaacctggatgaagtgcatgaaggtctgctgctgcaggcggtcagggcctcctggctggccaaagagaacagggcacgtattgatgacgtggtggatttcctgaaaaacgccagtgacagcgagcagtatgccgggtcaccgactatccgcagccgtctggacgaaatgattgtgctgcttgaccagtacactgccaacggcacttacggccngtattttaactctgatgagccgtccctgcgggatgacgcaaaaatggtggtgctggagctgggcggactggaagaccgtccgtcactgctggttgcggtgatgttctccctgattatctacatcgagaacaggatgtaccgcacgccgcgtaacctcaagaaactgaacgtcattgatgaaggctggcgtctgctggacttcaaaaatcacaaggtcggtgagtttattgagaaaggttaccgtaccgcccgtcgtcataccggtgcttatatcaccatcacacagaacatcgtcgactttgactctgacaaggcctccagtgcggcccgtacggcatggggtaactcctcctacaaaattatcctcaaacagagtgcgaaggagttcgcaaaatacaaccagctgtatccggaccagttccagccactgcagcgcgacatgattggtaagtttggtgcggccaaagaccagtggttcagttccttcctgctgcaggtggaaaaccattcctcctggcaccgcctgtttgtggacccgttaagccgcgccatgtacagctctgacggcccggattttgagtttgtgcagcagaaacgtaaagaggggctgagtattcatgaggcggtgtggcagctggcgtggaagaagtcagggccggagatggcttcgctggaagcctggctggaagaacatgagaaatacaggagtgttgcatga

SEQ ID NO: 7234 - protein, 423 aa, Shigella sonnei
  misc_feature (185)..(185): Xaa can be any naturally occurring amino acid
MCPLPCHTYRNQLAFIDIFFRGMNNTNYNMAVCGTSGAGKTGLIQPLIRSVLDSGGFAVVFDMGDGYKSLCENMGGVYLDGETLRFNPFANITDIDQSAERVRDQLSVMASPNGNLDEVHEGLLLQAVRASWLAKENRARIDDVVDFLKNASDSEQYAGSPTIRSRLDEMIVLLDQYTANGTYGXYFNSDEPSLRDDAKMVVLELGGLEDRPSLLVAVMFSLIIYIENRMYRTPRNLKKLNVIDEGWRLLDFKNHKVGEFIEKGYRTARRHTGAYITITQNIVDFDSDKASSAARTAWGNSSYKIILKQSAKEFAKYNQLYPDQFQPLQRDMIGKFGAAKDQWFSSFLLQVENHSSWHRLFVDPLSRAMYSSDGPDFEFVQQKRKEGLSIHEAVWQLAWKKSGPEMASLEAWLEEHEKYRSVA

SEQ ID NO: 7235 - DNA, 1155 bp, Escherichia coli
  misc_feature (823)..(823): n is a, c, g or t
atgaaaattagcgatggaaactggttgattcaacctggcctcaatttgattcacccgcttcaggtgttcgaggttgaacagcaggataatgaaatggtggtctatgctgccccccgtgatgtgcgtgaacgtacctggcagcttgatacgcctttatttacgctgcgctttttctccccacaggaaggtattgtcggtgtgcggattgagcattttcagggggcgctgaataacggtcctcattatccgctcaatattttgcaggacgtgaaggtcacaatcgaaaacacagaacgttatgctgagtttaaaagtggcaacttaagcgcgcgtgtcagcaaaggtgagttctggtcactggattttctgcgcaacggcgaacgtattaccggtagtcaggtgaaaaataatggctacgtgcaggacacgaataatcaacgcaattatatgtttgagcggcttgatcttggcgttggcgaaacagtttacggtctgggagagcgctttactgccctggtgcgcaatggccagacggtagagacctggaaccgggacggcggcacaagtactgaacaggcgtataaaaatatcccgttctacatgactaaccgtggttatggggtactggtcaatcatccccagtgtgtctcttttgaagtgggatcggagaaagtctccaaagtgcagttcagcgttgagagtgaatatctcgaatactttgttatcgacggcccgacgccgaaagcggtacttgatcgttatacccgctttactggtcgtccggcgctgccgcccgcgtggtccttcggcctgtggctaaccncttcatttaccaccaactacgacgaagcgacggtaaacagctttatcgatggtatggcggaacgcaatctgccgctgcatgttttccactttgactgtttctggatgaaagccttccagtggtgcgattttgagtgggacccgctgactttccctgacccggaagggatgatccgccgcctgaaagcgaaagggctgaaaatctgcgtctggattaacccctatatcggtcaaaaatcccccgtctttaaagagttacaagagaaaggctatttactcaaacgcccggacggttcgctatggcagtgggataaatggcagccaggtctgtaa

SEQ ID NO: 7236 - protein, 384 aa, Escherichia coli
  misc_feature (275)..(275): Xaa can be any naturally occurring amino acid
MKISDGNWLIQPGLNLIHPLQVFEVEQQDNEMVVYAAPRDVRERTWQLDTPLFTLRFFSPQEGIVGVRIEHFQGALNNGPHYPLNILQDVKVTIENTERYAEFKSGNLSARVSKGEFWSLDFLRNGERITGSQVKNNGYVQDTNNQRNYMFERLDLGVGETVYGLGERFTALVRNGQTVETWNRDGGTSTEQAYKNIPFYMTNRGYGVLVNHPQCVSFEVGSEKVSKVQFSVESEYLEYFVIDGPTPKAVLDRYTRFTGRPALPPAWSFGLWLTXSFTTNYDEATVNSFIDGMAERNLPLHVFHFDCFWMKAFQWCDFEWDPLTFPDPEGMIRRLKAKGLKICVWINPYIGQKSPVFKELQEKGYLLKRPDGSLWQWDKWQPGL

SEQ ID NO: 7237 - DNA, 663 bp, Shigella sonnei
  misc_feature (385)..(385): n is a, c, g or t
atgtcaattgagcatattttaatcgggaaacatcatgggggttctgattactggagaactccatttttgttatttaagaacttacaccgtgaatttattttcagtctagatggtgctgcaactgagcatgacacgctgttaccacgattcaccaatgatataagccgtcaatcatgggttagtgaaaaggtcttctgtaacccgccgtacagcgatattccgtcgttcctcttaaaagcgtctgaagcggatttagtagctttcctgataccgcatagagccaacaccagctactggcttaggcacatttacagcaataaccactgtcatgaaatccgtattcttcatcgtgcagttaaataccttccaccagcaggccataacnggcttactattcgttcaccgtttcctagtgcagtcgttgtttttaaaaaagaaccacgtaagcacgaaattacacagacggtttgctgtggtgacacgctattaccgttaaccatcattaacagaggaggcttgagaggaagacccaccatttacccacctgagacgctcgacagcttcataaaactatacaggcaaggaaaacccattaagtacattgcagatgctctcagaatgcctctgagcacgtcatacaggattgctcaaaggttgagctaa

SEQ ID NO: 7238 - protein, 220 aa, Shigella sonnei
  misc_feature (129)..(129): Xaa can be any naturally occurring amino acid
MSIEHILIGKHHGGSDYWRTPFLLFKNLHREFIFSLDGAATEHDTLLPRFTNDISRQSWVSEKVFCNPPYSDIPSFLLKASEADLVAFLIPHRANTSYWLRHIYSNNHCHEIRILHRAVKYLPPAGHNXLTIRSPFPSAVVVFKKEPRKHEITQTVCCGDTLLPLTIINRGGLRGRPTIYPPETLDSFIKLYRQGKPIKYIADALRMPLSTSYRIAQRLS

SEQ ID NO: 7239 - DNA, 759 bp, Klebsiella aerogenes
  misc_feature (151)..(151): n is a, c, g or t
atgaatcaaccgttactttcggtcaataacctgacccacctttacgcgccgggcaaaggctttagcgatgtctcttttgatttatggccgggggaagtgctgggcattgtcggggaatccggctccgggaagaccacgctgctgaagtcgntctccgcgcgtctgacgccgcagcagggggagattcactatgaaaaccgttccctctatgcaatgagcgaggccgaccgccgtcgcctgctgcgcaccgaatggggcgtggtgcatcagcatccgctcgacggcctgcgccgccaggtgtcggcaggcggcaatatcggcgagcggctgatggcgaccggggcgcgacattacggcgatattcgcgctaccgcgcagaagtggctggaagaggtggagattcccgccaaccgtatcgacgacctgccgaccaccttttccggcggtatgcagcagcgtttgcagattgcccgcaacctggtgacgcatccgaagctggtgtttatggatgaaccgaccggcgggctggatgtgtcggtgcaggcccgcctgctcgacctgctgcgcggactggtggtggagctgaacctcgcggtagtgattgtcacccacgatttaggcgtcgcccgcctgctggcggaccgtttgctggtgatgaagcaggggcaagtggtggagagtgggttaaccgaccgcgtgctcgacgacccgcatcatccgtatacacagctgctggtgtcatcggttttgcagaattga

SEQ ID NO: 7240 - protein, 252 aa, Klebsiella aerogenes
  misc_feature (51)..(51): Xaa can be any naturally occurring amino acid
MNQPLLSVNNLTHLYAPGKGFSDVSFDLWPGEVLGIVGESGSGKTTLLKSXSARLTPQQGEIHYENRSLYAMSEADRRRLLRTEWGVVHQHPLDGLRRQVSAGGNIGERLMATGARHYGDIRATAQKWLEEVEIPANRIDDLPTTFSGGMQQRLQIARNLVTHPKLVFMDEPTGGLDVSVQARLLDLLRGLVVELNLAVVIVTHDLGVARLLADRLLVMKQGQVVESGLTDRVLDDPHHPYTQLLVSSVLQN

SEQ ID NO: 7241 - DNA, 1200 bp, Enterobacter asburiae
  misc_feature (425)..(425): n is a, c, g or t
atgaagcatctcactctcctcggctcgactggctctatcggttgcagcactctcgacgttgtacgtcataatcctgacagctacaccgtggccgcgcttgtggccggaaaaaacgtgcagcgaatggtcgaacagtgcctggagtttaccccccgttttgcggtgatggatgacgaagagagcgcccgccaggtgaaagcgctgttgcaggagaagggctgccgtaccgaggtactcagcgggcaacaggcggcttgcgatatggccgcgcttgatgaagttgatcaggtcatggcggcaatcgtcggggcggcgggtcttctgccaacgcttgccgctattgatgcggggaaagatgtcctgcttgcgaacaaagagtcgctggtcacctgcggacgcctctttatggaggcggtaaaacagcntggggcgcgtcttttgccggtcgatagcgaacacaacgcgatttttcagagtttgcctcaaccttttcaacaaaacctggggtacgctgacctggagcagaatggcgttgtgtcgattctgcttaccgggtctggtggcccgttccgtgaaacgccactgtctgaattgagcgcaatgacgccggatcaggcgtgtcgtcatccgaactggtcaatggggcgtaagatctccgtcgattcggccaccatgatgaacaaaggtctggaatacattgaagctcgctggctgttcaatgcgtcggcgaaacagatggaagtgctgatccacccgcagtcggtgattcactcgatggtgcgctatcaggacggcagcgtgctggcccagctgggcgaaccggatatgcgtacgcctattgctcatacgatggcgtggccaaaccgcgtaaaatcgggcgttaagcctctcgatttttgtaagctgagttcactgacgtttagcgagcctgattatgaccgttatccctgtctgaaactggcgatgacggccttcgatcaggggcaggcggcgacaacggcgcttaatgcagccaatgaagtgaccgttgaagcattcctgaatcagcagatccgctttactgacatcgccgcgttgaatttatccgtgctggagatgatggatttgcgtgagccgcagagcgtcgaagaggtgctggccgtggatgaacaggcacgcattgttgcgcgtaaacaggtgacacgtctcgcaggctggtga

SEQ ID NO: 7242 - protein, 399 aa, Enterobacter asburiae
  misc_feature (142)..(142): Xaa can be any naturally occurring amino acid
MKHLTLLGSTGSIGCSTLDVVRHNPDSYTVAALVAGKNVQRMVEQCLEFTPRFAVMDDEESARQVKALLQEKGCRTEVLSGQQAACDMAALDEVDQVMAAIVGAAGLLPTLAAIDAGKDVLLANKESLVTCGRLFMEAVKQXGARLLPVDSEHNAIFQSLPQPFQQNLGYADLEQNGVVSILLTGSGGPFRETPLSELSAMTPDQACRHPNWSMGRKISVDSATMMNKGLEYIEARWLFNASAKQMEVLIHPQSVIHSMVRYQDGSVLAQLGEPDMRTPIAHTMAWPNRVKSGVKPLDFCKLSSLTFSEPDYDRYPCLKLAMTAFDQGQAATTALNAANEVTVEAFLNQQIRFTDIAALNLSVLEMMDLREPQSVEEVLAVDEQARIVARKQVTRLAGW

SEQ ID NO: 7243 - DNA, 852 bp, Enterobacter cloacae complex
  misc_feature (406)..(406): n is a, c, g or t
atggctgaaattaccgcatccctggtaaaagagctgcgtgagcgtactggcgcaggcatgatggattgcaaaaaagcgctgaccgaagcgaacggcgacatcgagctggcaatcgaaaacatgcgtaaatccggtgcgatcaaagcagctaagaaagcaggcaacgttgctgctgacggcgtgatcatcaccaaaatcgacggcaactacggcatcattctggaagttaactgccagactgacttcgttgctaaagatgctggtttccaggcatttgctaacaaagttctggacgcagcggttgcaggcaaaatcactgacgttgaaattctgaaagcacagttcgaagaagagcgtgtagcgctggttgctaaaatcggtgagaacatcaacatccgtcgcgttncttccctggaaggcgatgttctgggctcttaccagcacggcgcgcgtatcggtgttctggttgcggctaaaggcgctgacgaagagctggttaaacagctggcaatgcacatcgctgcaagcaaaccagaattcgttaagccagaagacgtgtctgctgaagtggtagagaaagagtaccaggttcagctggacatcgcgatgcagtctggtaagccaaaagaaatcgcagagaaaatggttgaaggccgcatgaagaaattcaccggcgaagtttctctgactggccagcctttcgtaatggatccaagcaagtctgttgctcagctgctgaaagagcacaacgctgatgtaactggcttcatccgcttcgaagtgggcgaaggcatcgagaaagttgagactgacttcgcagcagaagttgctgcaatgtccaagcagtcttaa

SEQ ID NO: 7244 - protein, 283 aa, Enterobacter cloacae complex
  misc_feature (136)..(136): Xaa can be any naturally occurring amino acid
MAEITASLVKELRERTGAGMMDCKKALTEANGDIELAIENMRKSGAIKAAKKAGNVAADGVIITKIDGNYGIILEVNCQTDFVAKDAGFQAFANKVLDAAVAGKITDVEILKAQFEEERVALVAKIGENINIRRVXSLEGDVLGSYQHGARIGVLVAAKGADEELVKQLAMHIAASKPEFVKPEDVSAEVVEKEYQVQLDIAMQSGKPKEIAEKMVEGRMKKFTGEVSLTGQPFVMDPSKSVAQLLKEHNADVTGFIRFEVGEGIEKVETDFAAEVAAMSKQS

SEQ ID NO: 7245 - DNA, 1896 bp, Citrobacter koseri
  misc_feature (794)..(794): n is a, c, g or t
atggctatcgaaatcaatgtaccggacatcggggctgatgaagttgaaatcaccgagatcctggtcaaagtgggcgacaaagttgaagctgaacagtcgctgatcaccgtagaaggcgacaaagcttctatggaagtcccgtctcctcaggctggcatcgttaaagagatcaaagtctctgttggcgataaaaccgagaccggtaaactgatcatgattttcgattccgccgacggtgcagcagctgctgcacctgcgcaggaagagaagaaagaagcagcacctgctgctgctccagcagcggccgcggcagcgaaagaagtgaacgtgcctgacatcggcggtgacgaagttgaagtcactgaaatcctggtgaaagtgggcgataccgttgcggccgagcagtcactgatcaccgtagaaggcgacaaagcctctatggaagtgccggcaccgttcgcgggtaccgttaaagagatcaagatcaacaccggcgacaaagtgtctacaggttccctgatcatgattttcgaagtggcgggcgctgaaggcgctgcggctccagcgaaagcggaagctgctccggctccggctgctgcaccagcggctgctggcggcgtgaaagacgttaacgtaccggacatcggcggtgacgaagttgaagtgaccgaagtgatggtaaaagtgggcgacaaagttgccgctgaacagtcactgatcaccgttgaaggcgacaaagcttctatggaagtgcctgcgccgttcgccggtaccgttaaagagatcaaaatcancaccggcgacaaagtatctaccggctctctgatcatggtcttcgaagtggaaggcgcagcacctgccgccgctccagctgccgcggctgctccggcaccggctgctgcaccggctcaggctgctaaaccggctgctgcccctgctgctaaagcagaaaaatctgagttcgctgaaaacgacgcttacgtccacgcgactccgctgattcgtcgcctggcgcgcgaattcggtgtgaacctggcgaaagtgaagggcactggtcgtaaaggccgtatcctgcgcgaagacgttcaggcttacgtgaaagatgcggtgaaacgcgccgaagctgcacctgctgctgccggtggcggtatcccgggcatgctgccatggccgaaagtggacttcagcaagttcggtgaaatcgaagaagtggaactgggccgtatccagaaaatctcgggtgctaacctgagccgtaactgggtaatgatcccgcacgttacccacttcgataagaccgatatcaccgatctggaagcgttccgtaaacagcagaacgccgaagctgagaagcgtaagctggacgtgaagttcactccagtggtcttcatcatgaaagcggttgccgctgcccttgagcagatgcctcgcttcaacagctccctgtccgaagacggccagaagctgacgctgaagaagtacatcaacatcggtgttgcggttgatacgccaaatggtctggttgttccggtcttcaaagacgtgaacaagaagagcgtcactgagctgtcccgtgaactgaccaccatctccaaaaaagcgcgtgatggtaagctgactgccggcgaaatgcagggcggctgcttcactatctccagcatcggcggcctgggtaccacccacttcgcaccgattgtgaacgcgccggaagtggctatcctcggtgtgtccaagtccgcgatggagccggtgtggaatggcaaagagttcgtgccgcgtctgatgatgccaatctctctgtccttcgaccaccgcgtgatcgacggggctgatggtgcgcgtttcatcaccatcatcaacaacatgctgagcgacattcgccgcctggtgatgtaa

SEQ ID NO: 7246 - protein, 631 aa, Citrobacter koseri
  misc_feature (265)..(265): Xaa can be any naturally occurring amino acid
MAIEINVPDIGADEVEITEILVKVGDKVEAEQSLITVEGDKASMEVPSPQAGIVKEIKVSVGDKTETGKLIMIFDSADGAAAAAPAQEEKKEAAPAAAPAAAAAAKEVNVPDIGGDEVEVTEILVKVGDTVAAEQSLITVEGDKASMEVPAPFAGTVKEIKINTGDKVSTGSLIMIFEVAGAEGAAAPAKAEAAPAPAAAPAAAGGVKDVNVPDIGGDEVEVTEVMVKVGDKVAAEQSLITVEGDKASMEVPAPFAGTVKEIKIXTGDKVSTGSLIMVFEVEGAAPAAAPAAAAAPAPAAAPAQAAKPAAAPAAKAEKSEFAENDAYVHATPLIRRLAREFGVNLAKVKGTGRKGRILREDVQAYVKDAVKRAEAAPAAAGGGIPGMLPWPKVDFSKFGEIEEVELGRIQKISGANLSRNWVMIPHVTHFDKTDITDLEAFRKQQNAEAEKRKLDVKFTPVVFIMKAVAAALEQMPRFNSSLSEDGQKLTLKKYINIGVAVDTPNGLVVPVFKDVNKKSVTELSRELTTISKKARDGKLTAGEMQGGCFTISSIGGLGTTHFAPIVNAPEVAILGVSKSAMEPVWNGKEFVPRLMMPISLSFDHRVIDGADGARFITIINNMLSDIRRLVM

SEQ ID NO: 7247 - DNA, 1317 bp, Enterobacter cloacae
  misc_feature (194)..(194): n is a, c, g or t
atggcagattaccagggcaaaaaagtcgtaatcatcgggttgggcctcaccggcctctcctgcgtggactttttccttgcgcgtggcgtgacgccgcgcgtgatggatacgcgcgtctctccatcgggtctggacaagctgccggagcaggttgaacgccacctgggtggtctgaatgatgagtggctgctggncgccgatctgatagttgccagccccggtatggcgctggcgcatccttccctgaacgccgccgcggatgcgggcgttgagattgtcggcgatatcgaactgttctgccgggaggcgcaggccccgatcgtcgccattaccggttcaaacggtaaaagcaccgtcaccacgctggtgggggaaatggcgaaggcggcgggcaaaaatgtcggcgtgggcggtaacattggtctgcccgctctgatgctgcttgataaagggtgtgagctgttcgtccttgagctttccagcttccagctggaaaccacttcaagcctgcatgcggcggcggcgacgatcctaaacgtcaccgaagatcatatggacagatacccgttcggcttgcagcagtaccgtgcggccaaactgcgcgtttatgaaaatgccaaagtttgcgtagtgaatgccgatgatgcactcaccatgccggtgcgcggcgcagacgaacgctgcattagcttcggtattaacatgggtgactatcaccttaatcgtcagcagggcgaaacctggctacgtgtgaaaggtgagaaagtgctgaacgtgaaagaaatgatgctctccggccagcataactacactaatgccctggcggcgctggcgctggcggatgctgttggcctgccgcgatcttcaagcctgaaggcgctcaccacctttaccggcctggcgcaccgcttccagctggcgctggagcacaacggcgtacgctggattaatgattccaaagcgaccaacgtgggtagcaccgaggcggcactgaacggtttgcacgttgatggcacgctatacctgctgctgggcggcgacggtaaatcggctgacttctcctcgctgaagcagtacctcaacggtgataacgtgcgcctgtattgctttggccgcgatggcagcgagctggcggcgttgcgtcctgaagtcgccgagcaaaccgagaccatggagcaggcgatgcgcctcatcgccccacgcgtgaagcccggcgatatggtactgctctcgccagcctgtgccagcctcgatcaattcaagagtttcgaacagcggggtgatgtctttacccgcctggcgaaggagttaggctga

SEQ ID NO: 7248 - protein, 438 aa, Enterobacter cloacae
  misc_feature (65)..(65): Xaa can be any naturally occurring amino acid
MADYQGKKVVIIGLGLTGLSCVDFFLARGVTPRVMDTRVSPSGLDKLPEQVERHLGGLNDEWLLXADLIVASPGMALAHPSLNAAADAGVEIVGDIELFCREAQAPIVAITGSNGKSTVTTLVGEMAKAAGKNVGVGGNIGLPALMLLDKGCELFVLELSSFQLETTSSLHAAAATILNVTEDHMDRYPFGLQQYRAAKLRVYENAKVCVVNADDALTMPVRGADERCISFGINMGDYHLNRQQGETWLRVKGEKVLNVKEMMLSGQHNYTNALAALALADAVGLPRSSSLKALTTFTGLAHRFQLALEHNGVRWINDSKATNVGSTEAALNGLHVDGTLYLLLGGDGKSADFSSLKQYLNGDNVRLYCFGRDGSELAALRPEVAEQTETMEQAMRLIAPRVKPGDMVLLSPACASLDQFKSFEQRGDVFTRLAKELG

SEQ ID NO: 7249 - DNA, 900 bp, Enterobacter cancerogenus
  misc_feature (173)..(173): n is a, c, g or t
atgtttaaacagcttcaggatatggcgctgtttgcgctggtggccgagatgggcagctttaccgcggcggcgcagaaggcggaactgccgaaatccagcgtcagccagcggattagccagctggagcagcaggtggggatccgtctgttgaatcgcaccacgcgcaggatcancctgacgtttgcaggcgagcactatctggtgcactgtcgtgaaatgctggcggccagcgagcgcgcggagtatgccattcagcggctgcgcgaaaaccccagcgggcggctgcggatcacctgtccggcgggaattggcgcgacgctgctggcgcatatgaatgccgagttccagcttcgctatccggacgtgtcgctggatgtgtcgatctcagacgacgtggtggatctggtcgagtctggctttgacgtggcgctgcgcaccggcaaaccgcaggattcttccctgattggccgcatgattgggcactgtccgcgctacatgctggcctcgccccactacctggcgcgtcgggcgccgttaatccatccccgacagctggtggagcaccgctgcattacgcaccgggcatggtcggagtggcttctgcgaagcgagagtgaggattatcggtatctgccggataacgcccatatgaccgataacctggtgtacgcccgggaatgcgccattgccggggcggggatcacgctgttacccgcattcctgctggaagataagatcgaaaagggcgcgctggtgaaggtgctgccggcgtggagcgttgagggaaacgatctctggctggcctacccgagccgtaagctcaattcgcctgcgctgatgagctatatcgactttgcgatgcagtttgatgaggtgaagcggtattacgtgggcaaataa

SEQ ID NO: 7250 - protein, 299 aa, Enterobacter cancerogenus
  misc_feature (58)..(58): Xaa can be any naturally occurring amino acid
MFKQLQDMALFALVAEMGSFTAAAQKAELPKSSVSQRISQLEQQVGIRLLNRTTRRIXLTFAGEHYLVHCREMLAASERAEYAIQRLRENPSGRLRITCPAGIGATLLAHMNAEFQLRYPDVSLDVSISDDVVDLVESGFDVALRTGKPQDSSLIGRMIGHCPRYMLASPHYLARRAPLIHPRQLVEHRCITHRAWSEWLLRSESEDYRYLPDNAHMTDNLVYARECAIAGAGITLLPAFLLEDKIEKGALVKVLPAWSVEGNDLWLAYPSRKLNSPALMSYIDFAMQFDEVKRYYVGK

SEQ ID NO: 7251 - DNA, 1002 bp, Enterobacter cloacae
  misc_feature (674)..(674): n is a, c, g or t
atgtcagtgaaagccattgccgttaacccggaaaatccgtccaccttcgttgaaatcactccgccgatgccgcagcccggtgaacacgatctgctggtggaggtaaaagccgtctccgtaaacccggtggacaccaaggtacatgcaggcattgccaaaagcggactgaaggagccgcgcattctcgggtgggatgccagcggtatcgtacaagccgttggggctggcgtcaccggattcaaaccgggtgacgaagtgtggtacgcgggggatatcacccgtccgggcagtaataccacgcaccagctgatcgatgcgcgcattgtcgggcacaagcctgcaagccttgactgggccgccgcggctgcattgccgctgacggcgctcaccgcgtgggaaggcctgtttgaacggctgaagattcaggatgccgacgcagataaaacgctgctgataattggcggcgcgggtggagtcggatcgctggcgatcccgtttgcgaagcacaacagcaaggtgaagatcgtcgcaaccgcttcacgagaagattccgcccggtggtgtcgcgatcgcggggctgacattgttgtaaattaccgcgacctgaagggagaactggcgaaacaggggctcacctttgtggattacatttttatcctcaacgataccgacgngcactgggatgcggtcagcgatctgattgcccctcagggagacatttgttccatcgttgaaaacgcgcatccgctgaaccaggacaagctgaagtccaaatctgccgccctgcactgggagtttatgtacacccgtagcatgtaccagactgcggatatggcgcgtcagggtgagattttagatgaggtggcgaagctggtggataacggcgtggtggaaagctcgctcagcgaaacgctgcacgggctaagcgtggaaagcattaccgaagcgcaccgcagggtactggaggggcatatgcgtgggaaggtggtggttgagtattga

SEQ ID NO: 7252 - protein, 333 aa, Enterobacter cloacae
  misc_feature (225)..(225): Xaa can be any naturally occurring amino acid
MSVKAIAVNPENPSTFVEITPPMPQPGEHDLLVEVKAVSVNPVDTKVHAGIAKSGLKEPRILGWDASGIVQAVGAGVTGFKPGDEVWYAGDITRPGSNTTHQLIDARIVGHKPASLDWAAAAALPLTALTAWEGLFERLKIQDADADKTLLIIGGAGGVGSLAIPFAKHNSKVKIVATASREDSARWCRDRGADIVVNYRDLKGELAKQGLTFVDYIFILNDTDXHWDAVSDLIAPQGDICSIVENAHPLNQDKLKSKSAALHWEFMYTRSMYQTADMARQGEILDEVAKLVDNGVVESSLSETLHGLSVESITEAHRRVLEGHMRGKVVVEY

SEQ ID NO: 7253 - DNA, 1002 bp, Enterobacter cloacae
  misc_feature (616)..(616): n is a, c, g or t
atgtcagtgaaagccattgccgttaacccggaaaatccgtccaccttcgttgaaatcactccgccgatgccgcagcccggtgaacacgatctgctggtggaggtaaaagccgtctccgtaaacccggtggacaccaaggtacatgcaggcattgccaaaagcggactgaaggagccgcgcattctcgggtgggatgccagcggtatcgtacaagccgttggggctggcgtcaccggattcaaaccgggtgacgaagtgtggtacgcgggggatatcacccgtccgggcagtaataccacgcaccagctgatcgatgcgcgcattgtcgggcacaagcctgcaagccttgactgggccgccgcggctgcattgccgctgacggcgctcaccgcgtgggaaggcctgtttgaacggctgaagattcaggatgccgacgcagataaaacgctgctgataattggcggcgcgggtggagtcggatcgctggcgatcccgtttgcgaagcacaacagcaaggtgaagatcgtcgcaaccgcttcacgagaagattccgcccggtggtgtcgcgatcgcggggctgacattgttgtaaattaccgcgacctgaagggagaantggcgaaacaggggctcacctttgtggattacatttttatcctcaacgataccgacgggcactgggatgcggtcagcgatctgattgcccctcagggagacatttgttccatcgttgaaaacgcgcatccgctgaaccaggacaagctgaagtccaaatctgccgccctgcactgggagtttatgtacacccgtagcatgtaccagactgcggatatggcgcgtcagggtgagattttagatgaggtggcgaagctggtggataacggcgtggtggaaagctcgctcagcgaaacgctgcacgggctaagcgtggaaagcattaccgaagcgcaccgcagggtactggaggggcatatgcgtgggaaggtggtggttgagtattga

SEQ ID NO: 7254 - protein, 333 aa, Enterobacter cloacae
  misc_feature (206)..(206): Xaa can be any naturally occurring amino acid
MSVKAIAVNPENPSTFVEITPPMPQPGEHDLLVEVKAVSVNPVDTKVHAGIAKSGLKEPRILGWDASGIVQAVGAGVTGFKPGDEVWYAGDITRPGSNTTHQLIDARIVGHKPASLDWAAAAALPLTALTAWEGLFERLKIQDADADKTLLIIGGAGGVGSLAIPFAKHNSKVKIVATASREDSARWCRDRGADIVVNYRDLKGEXAKQGLTFVDYIFILNDTDGHWDAVSDLIAPQGDICSIVENAHPLNQDKLKSKSAALHWEFMYTRSMYQTADMARQGEILDEVAKLVDNGVVESSLSETLHGLSVESITEAHRRVLEGHMRGKVVVEY

SEQ ID NO: 7255 - DNA, 1002 bp, Enterobacter cloacae
  misc_feature (935)..(935): n is a, c, g or t
atgtcagtgaaagccattgccgttaacccggaaaatccgtccaccttcgttgaaatcactccgccgatgccgcagcccggtgaacacgatctgctggtggaggtaaaagccgtctccgtaaacccggtggacaccaaggtacatgcaggcattgccaaaagcggactgaaggagccgcgcattctcgggtgggatgccagcggtatcgtacaagccgttggggctggcgtcaccggattcaaaccgggtgacgaagtgtggtacgcgggggatatcacccgtccgggcagtaataccacgcaccagctgatcgatgcgcgcattgtcgggcacaagcctgcaagccttgactgggccgccgcggctgcattgccgctgacggcgctcaccgcgtgggaaggcctgtttgaacggctgaagattcaggatgccgacgcagataaaacgctgctgataattggcggcgcgggtggagtcggatcgctggcgatcccgtttgcgaagcacaacagcaaggtgaagatcgtcgcaaccgcttcacgagaagattccgcccggtggtgtcgcgatcgcggggctgacattgttgtaaattaccgcgacctgaagggagaactggcgaaacaggggctcacctttgtggattacatttttatcctcaacgataccgacgggcactgggatgcggtcagcgatctgattgcccctcagggagacatttgttccatcgttgaaaacgcgcatccgctgaaccaggacaagctgaagtccaaatctgccgccctgcactgggagtttatgtacacccgtagcatgtaccagactgcggatatggcgcgtcagggtgagattttagatgaggtggcgaagctggtggataacggcgtggtggaaagctcgctcagcgaaacgctgcacgggctaagcgtggaaancattaccgaagcgcaccgcagggtactggaggggcatatgcgtgggaaggtggtggttgagtattga

SEQ ID NO: 7256 - protein, 333 aa, Enterobacter cloacae
  misc_feature (312)..(312): Xaa can be any naturally occurring amino acid
MSVKAIAVNPENPSTFVEITPPMPQPGEHDLLVEVKAVSVNPVDTKVHAGIAKSGLKEPRILGWDASGIVQAVGAGVTGFKPGDEVWYAGDITRPGSNTTHQLIDARIVGHKPASLDWAAAAALPLTALTAWEGLFERLKIQDADADKTLLIIGGAGGVGSLAIPFAKHNSKVKIVATASREDSARWCRDRGADIVVNYRDLKGELAKQGLTFVDYIFILNDTDGHWDAVSDLIAPQGDICSIVENAHPLNQDKLKSKSAALHWEFMYTRSMYQTADMARQGEILDEVAKLVDNGVVESSLSETLHGLSVEXITEAHRRVLEGHMRGKVVVEY

SEQ ID NO: 7257 - DNA, 1371 bp, Escherichia coli
  misc_feature (233)..(233): n is a, c, g or t
atggcttaccagacagtaaatcctgccacgaaccagctcatcaaagaatatccctctcacactgacgcagacgttgaagcggcgctgaaggcagccgatgcgctctatcactccgactgggcgaaaggcgacataagccagcgcctgccggtgctgcataagctggcggacctgatcgacgaacgcgtggaggatctggcgaaaatcgccagtcaggagatgggtaagctcancgaacaaagccgcggcgaagtgaagctgtgcgcgcaaatcgcccgctactatgcggacaacgcgaagcagttcctggccccggtgaagtatgactctgaactcggggaagcatgggttgaacatcaccccatcggcgtgctgatggccgtcgagccatggaacttcccgtactatcagctgatgcgcgttctggcgccaaacctggcagcgggcaacccggtgatcgccaagcacgccagcatcgtgccgcactgtgcagagacctttgcacagctggtacgtgaagcgggcgcgccggaaggggcgtggaccaacctgtttatctcgtccgaacaggtggcgaacattatcgccgacaatcgcgtacagggggcggcgctgaccggttcagaaaaagcgggtagcgtggttgcggcacaggctgcgaagcacatcaaaaaatcgaccctggaactgggcgggaacgatgtgttcgtggtgctggacgatgccgacctggataaagccgtgaagatcggcgttaacgcgcggctgaacaatgccgggcaggtctgtaccgcggcgaagcgctttatcctgcatgaaaagattgcagacgccttcctgagcaaattcaccgaggcgtttaagcaggtgaaaattggcgatccgctggacgaaagcaccacgctggggcctttgtcatccaaagacgcgctggagacgctaactaaacaggttaacgaggcggtgaaaaatggcgcgaagctgcaccatggcggcaagccggttcagcgtgacggaagcttctttgagccgacgatcctgacacatatctcgcgcgataacccggcgtacttcgaggagttcttcggtccggtagcgcaggtttacgtggtgaaaagcgacgacgaagcggtcgcactggctaacgattcccactacggtctgggcggcgcggtgttcagccagaacatcgagcgcgcgaagaaaatggcgtcgcgcattgagaccgggatggtatacatcaactggctcaccgacactgcggcagagctgccgttcggcggcgtaaaacgttcgggttacggacgcgagctgtcggacctggggatcaaagagtttgtgaaccagaagctggtggtcgttcgcaagtaa

SEQ ID NO: 7258 - protein, 456 aa, Escherichia coli
  misc_feature (78)..(78): Xaa can be any naturally occurring amino acid
MAYQTVNPATNQLIKEYPSHTDADVEAALKAADALYHSDWAKGDISQRLPVLHKLADLIDERVEDLAKIASQEMGKLXEQSRGEVKLCAQIARYYADNAKQFLAPVKYDSELGEAWVEHHPIGVLMAVEPWNFPYYQLMRVLAPNLAAGNPVIAKHASIVPHCAETFAQLVREAGAPEGAWTNLFISSEQVANIIADNRVQGAALTGSEKAGSVVAAQAAKHIKKSTLELGGNDVFVVLDDADLDKAVKIGVNARLNNAGQVCTAAKRFILHEKIADAFLSKFTEAFKQVKIGDPLDESTTLGPLSSKDALETLTKQVNEAVKNGAKLHHGGKPVQRDGSFFEPTILTHISRDNPAYFEEFFGPVAQVYVVKSDDEAVALANDSHYGLGGAVFSQNIERAKKMASRIETGMVYINWLTDTAAELPFGGVKRSGYGRELSDLGIKEFVNQKLVVVRK

SEQ ID NO: 7259 - DNA, 1389 bp, Enterobacter cloacae
  misc_feature (961)..(961): n is a, c, g or t
atgaagccaggctatcacgacatttatacccgctatcgcgataacatcacgcgcggcgtactgaagcccggcgacaaagtgcctgccatccgcgtgctggctgaagagcttaaggtcgcgcgaaaaaccgttgaaacagcctatgccattctgacgggggaaggatatctggtaagccagggcgcgcgcggcacgcgggtgaatccggatcttctgctgcccgcgcaaaacgctccggcagaacaagcgaccggcacgctgccggcgtcgttgattagccagcgcgaacgggccggttttctgcgccccggcattcccgcgctcgacagcttcccctataaaaaatggctgctgctggcaggccaggcgacgcgcgccatgcgtcaggatgaaatgctcaacccgccggtgctgggctggtatccgctgcgcgaggcaattgcccgctatctcaatatctcgcgcgggttgtcctgcaccgcagaacaggtgctgatcaccagcggctacagcggcagcctgcgcctgatcctcgacacgctcgccagccgcagcgataaggtggtatttgaggatccgggctactttatgggccagcagttgctcaagcgcattgtgccccgcctgcacaccgtgccggtcgatcgcgcagggatggatacggactacctgctgcgtaatcaccacgatgcccgcttcgccatcgttaccccgtcgcaccagagtccgctggcggtgacgctctccctgccgcgcaagcagcagctgctcgactgggcgtcacaaaacgaggcatggattatcgaagatgactatgacggcgaatttcactacacccgcaaagtgctgccgtcgctgaaaagcctcgaccagcatgacagggtgatctttatgggcacctttagcaaaaccatcatgccttcactgcgcatgggctacgtggtgatgcccgccagcaccntcggcgcgtttaccgacagcgcggacatcctcaccagcggccagccggtgctgacgcaaaagatcctcacagcctttctcaacgaggggcattttttccgtcatctgaaaaagatgcgcgcgctctatcaaacccgcagcgactggatgattgccgccctgcgtgaggtctatggtgatctgttcttcaccgagcaaaacgacggtggaatgcatattgtcgcgttcctcgcaaagggaagcgctgaccgggagatcgcccgctgctggcaggaacagcaattgcaggtcaatgcgctttcggcgtggtatcgcgggtcgggcaaacgctacgggctggtgatgggctataacaacgtgcggtcatatcaggaggcggttgagctgctggaaaggccgaaacggcagacgcttacgctgttgagctga

SEQ ID NO: 7260 - protein, 462 aa, Enterobacter cloacae
  misc_feature (321)..(321): Xaa can be any naturally occurring amino acid
MKPGYHDIYTRYRDNITRGVLKPGDKVPAIRVLAEELKVARKTVETAYAILTGEGYLVSQGARGTRVNPDLLLPAQNAPAEQATGTLPASLISQRERAGFLRPGIPALDSFPYKKWLLLAGQATRAMRQDEMLNPPVLGWYPLREAIARYLNISRGLSCTAEQVLITSGYSGSLRLILDTLASRSDKVVFEDPGYFMGQQLLKRIVPRLHTVPVDRAGMDTDYLLRNHHDARFAIVTPSHQSPLAVTLSLPRKQQLLDWASQNEAWIIEDDYDGEFHYTRKVLPSLKSLDQHDRVIFMGTFSKTIMPSLRMGYVVMPASTXGAFTDSADILTSGQPVLTQKILTAFLNEGHFFRHLKKMRALYQTRSDWMIAALREVYGDLFFTEQNDGGMHIVAFLAKGSADREIARCWQEQQLQVNALSAWYRGSGKRYGLVMGYNNVRSYQEAVELLERPKRQTLTLLS

SEQ ID NO: 7261 - DNA, 1137 bp, Enterobacter cloacae
  misc_feature (280)..(280): n is a, c, g or t
atgcacacccgtaccctgcttgtcgcttcactctctttacttgctacctctgcaatcgctcaaacccagtacgcctgggtgggtacctataatccgaacggtgaagggctgtaccgctttaccgtcgatccgcaaaccggtgcgctgaacgataaaacactggtgagcaaactgccgaacgccgcgcagttaaccgtctcacacgacggcaaaacgctgtatctggcaagcgaagtggagcagggcgtggtgcaggcgctgcgcatcggtgataacggcncgctgagcgagctgaatcaggtgtcctccggcggcgcggggccggtgtatctttccctgacgccgaacggcaaacatctgctggtggcaaactacgtcagcggaactgtcgcggtgctgcccgttaacgcagacggcagcctgggcgatgctacggacacccatcaggacaaaggcgaaccgggcgcggcgaagccggaagctgccgtcgagggcagtttcgccatcagcgatcataacggcccacatgcgcacatgatcgccgccgatccggacgggaaatacgttttttccaccgatctggggctggatcgcatctatcagtaccgttttgacgatcaaaccgggaagctgactcctaacgatccgccatttatcagcgcctcctcaaaagggggcgggccgcgccacttcgtctttacgccgaaaggcgatgccctgtggctgattaacgaagaggcgtctacgctcacccattatgcgctggacagtaatggcaggctgaaagagggtaaaacggtttcagccctgccggacggttataaaggcaccagttttgctgccgggctggcgctaagcgccgacgggaaacagctgtatgtcgctaaccgtttgcataacagcatcgggcactttaccgtaacggcggagggtacgctgacgcatcaggatgatgtctggacgcgcggcgactatccgcgcaccctgacgctcgataagcagggtcgctggctgtacgtcatgaaccagcgcagcgacaacattacccgtttccgcgtggcgccggacggcaagctgagcgccgagccagactataccccggtcggcagcccatcccagatggtcatttcaccctga

SEQ ID NO: 7262 - protein, 378 aa, Enterobacter cloacae
  misc_feature (94)..(94): Xaa can be any naturally occurring amino acid
MHTRTLLVASLSLLATSAIAQTQYAWVGTYNPNGEGLYRFTVDPQTGALNDKTLVSKLPNAAQLTVSHDGKTLYLASEVEQGVVQALRIGDNGXLSELNQVSSGGAGPVYLSLTPNGKHLLVANYVSGTVAVLPVNADGSLGDATDTHQDKGEPGAAKPEAAVEGSFAISDHNGPHAHMIAADPDGKYVFSTDLGLDRIYQYRFDDQTGKLTPNDPPFISASSKGGGPRHFVFTPKGDALWLINEEASTLTHYALDSNGRLKEGKTVSALPDGYKGTSFAAGLALSADGKQLYVANRLHNSIGHFTVTAEGTLTHQDDVWTRGDYPRTLTLDKQGRWLYVMNQRSDNITRFRVAPDGKLSAEPDYTPVGSPSQMVISP

SEQ ID NO: 7263 - DNA, 741 bp, Enterobacter cloacae
  misc_feature (419)..(419): n is a, c, g or t
atgaaactgacccccaacttttaccgtgaccgcgtctgcctgaacgtgctggcaggctcaaaggccaacgccagcgccatttacgaggcggcggaaggtcatgtgctggtgggcgtgctctccaaaaattacccggacgtggcgagcgcggttgcggacatgcgcgaatacgcagccctgattgataatgcgctctccgtggggctgggcgcgggcgacccgaaccagtcagcgatggtgagtgaaatctcccgccaggtgcagccgcagcacgttaaccaggtctttaccggcgtggccaccagccgcgcgctgctggggcagaatgagtccgtggtcaacggtctggtctccccgaccggcaccgtcggcatggtgaaaatctccaccggcccgctgagcagcaaagcgccggacgncatagtgccggttgaaaccgctatcgccctgctgaaagatttcggcggcagctccatcaagtacttcccgatgggcggcctgaaatgccgtgacgaataccaggcggtggcggaagcctgcgcccgtcacgacttctggctggagccgaccgggggaatcgatctggagaacttcgaggcgatcttgcagatcgccctggatgcgggcgtgagcaaaatcatcccgcatatctacagctcgattatcgataaagccagcggtgatacgcgtccggaagatgtgcgtacgctgctggcgatgacgaagaagctggttaagtag

SEQ ID NO: 7264 - protein, 246 aa, Enterobacter cloacae
  misc_feature (140)..(140): Xaa can be any naturally occurring amino acid
MKLTPNFYRDRVCLNVLAGSKANASAIYEAAEGHVLVGVLSKNYPDVASAVADMREYAALIDNALSVGLGAGDPNQSAMVSEISRQVQPQHVNQVFTGVATSRALLGQNESVVNGLVSPTGTVGMVKISTGPLSSKAPDXIVPVETAIALLKDFGGSSIKYFPMGGLKCRDEYQAVAEACARHDFWLEPTGGIDLENFEAILQIALDAGVSKIIPHIYSSIIDKASGDTRPEDVRTLLAMTKKLVK

SEQ ID NO: 7265 - DNA, 999 bp, Klebsiella oxytoca
  misc_feature (994)..(994): n is a, c, g or t
atgaaaacgttaggtgaatttattgtcgagaagcagcacgagttctctcatgctacgggtgagctcactgctttgctgtcggcaataaagctgggcgctaagatcatccaccgcgatatcaacaaggccggtctggtcgatatcctgggtgccagcggtgccgagaacgttcagggtgaggttcagcagaaactcgacctgttcgccaatgaaaaactgaaagctgcactgcgcgcgcgcgacatcgttgcgggtatcgcctctgaagaagaagatgagatcgtcgtattcgaagggtgtgaacacgcgaaatacgttgttctgatggatccgctggacggctcctccaacatcgacgttaacgtttctgtcggtaccattttctccatctaccgtcgcgtcacgccggttggcacaccggtgacggaagaagacttcctgcaaccgggcagtaaacaggttgctgccggttatgtggtgtatggctcgtccaccatgctggtgtacaccaccggctgcggcgtacacgcctttacctacgatccgtccctgggcgtgttctgcctgtgccaggagcgtatgcgcttcccggagaagggcaacacctactccatcaacgaaggcaactacatcaaattcccgaacggcgtgaagaagtacatcaaattctgccaggaagaggataaagccacccagcgcccatacacctcgcgttacatcggctcgctggtggcggatttccaccgtaacctgctgaagggcggtatttacctctacccaagcaccgccagccacccggacggaaaactgcgtctgctgtacgagtgcaacccgatggcgttcctggccgaacaggcaggcggcaaggcgagcgacggtaaagagcgtattctggatatcgtgccggaaagcctgcaccagcgccgttcattcttcgtcggcaaccgccatatggtggatgacgttgaacgcatgatccgcgaattcccggacncgtaa

SEQ ID NO: 7266 - protein, 332 aa, Klebsiella oxytoca
  misc_feature (332)..(332): Xaa can be any naturally occurring amino acid
MKTLGEFIVEKQHEFSHATGELTALLSAIKLGAKIIHRDINKAGLVDILGASGAENVQGEVQQKLDLFANEKLKAALRARDIVAGIASEEEDEIVVFEGCEHAKYVVLMDPLDGSSNIDVNVSVGTIFSIYRRVTPVGTPVTEEDFLQPGSKQVAAGYVVYGSSTMLVYTTGCGVHAFTYDPSLGVFCLCQERMRFPEKGNTYSINEGNYIKFPNGVKKYIKFCQEEDKATQRPYTSRYIGSLVADFHRNLLKGGIYLYPSTASHPDGKLRLLYECNPMAFLAEQAGGKASDGKERILDIVPESLHQRRSFFVGNRHMVDDVERMIREFPDX

SEQ ID NO: 7267 - DNA, 1944 bp, Escherichia coli
  misc_feature (853)..(853): n is a, c, g or t
atgattaagtttagcgcaacgctcctggcaacgctgattgcggcaagcgttcaggcagcgacggtggatctccgtattctggaaaccaccgatctgcacagcaatatgatggacttcgattactacaaagatacccctacggaaaaattcggactggtacgcacggcaagtttgatcaacgccgcccgcggtgaagtgaaaaacagcgtgctggtcgataacggggacttaattcagggcagcccgctcggagactacatggcggcgaaggggctgaaaaaaggcgagatccatcctgtttataaggcaatgaatacgctggactatgccgtcggcaacctgggcaaccacgaatttaactacggcctgaaatacctgcacgacgcgctggcaggagcgaaattcccgtacgttaacgccaatatcatcgacgttaagacgaagaagccgctcttcaccccttatctgattaaagagaccgaggttgtcgaccaggacggtaaaaaacagacgctgaaaatcggctatatcggttttgtgccgccgcagatcatgacgtgggataaagccaacctcgacgggaaagtgaccgtcaacgacattaccgaaaccgcgtgcaaatacgtgccggagatgcgggcgaaaggggcggatgtggtcgtcgtcgtggcgcactctggcctctcggccgacccgtatcaggtgatggctgagaactccgtgtactatctcagccaggtgccgggcgtggatgcgatcctgttcggccacgcccacgccgtcttcccgggcaaagatttcgctgatatcaaaggcgcggacatcgaaaaagggacgctcaacggtgtgccancggtgatgccgggcatgtggggcgaccaccttggcgtggtggatctggtgctgaataacgacagcggaagctggaaagtcacgcagtcgaaagcggaagcgcgtccgatctacgacgcagcggccaaaaaatctctggcaggggaagataaaaagctggtcgacatcctgaagcatgaccacgacgcgacgcgtgaatttgtcagcaagccgatcggtaaatcggctgataacatgtacagcttcctcgcgctggtacaggatgacccgaccgtgcaggtagtcaacatggcgcagaaagcctatgcggagcactatattcagggcgatccggatcttgcaaatctgccggtactgtctgccgcggcgccattcaaagtgggcgggcggaagaacgatccggccagctacgttgaggtggaaaaaggccagctgaccttccgtaatgccgccgatctctacctctatcccaacaccctcgtggtggtgaaagccaccgggaaagaggtgaaggattggctggagtgctctgccgggcagttcaaccagatcgatccgcacagcagcaaaccgcagtcgctgattaactgggacggtttccgcacctacaacttcgacgtgatcgacggcgtggaatatcagattgacgttacccagcccgcgaaatatgacggcgaatgtcaggccattaatccgcaggcagaacgtatcaaaaacctgaccttcaacggcaaagcgattgatccgaataccactttcctggtggtgaccaacaactaccgcgcctatggcggcaagtttgccggtacgggtgacagccacatcgcctttgcctcgccggatgagaaccgttcggtgctggcggcgtggatcagcgcggagtcgaaaaagacgggtgaaattcatccggcggtggataacaactggcgacttgcgccgatccacagcgacactaagctggatattcgctttgagacatctccgtccgataaagcagccgcgtttatcaaggataaggcgcagtatccgatgcaaaaggtcgcgacggatgatattgggttcgcgatttatcaggtggatttgagcaggtag

SEQ ID NO: 7268 - protein, 647 aa, Escherichia coli
  misc_feature (285)..(285): Xaa can be any naturally occurring amino acid
MIKFSATLLATLIAASVQAATVDLRILETTDLHSNMMDFDYYKDTPTEKFGLVRTASLINAARGEVKNSVLVDNGDLIQGSPLGDYMAAKGLKKGEIHPVYKAMNTLDYAVGNLGNHEFNYGLKYLHDALAGAKFPYVNANIIDVKTKKPLFTPYLIKETEVVDQDGKKQTLKIGYIGFVPPQIMTWDKANLDGKVTVNDITETACKYVPEMRAKGADVVVVVAHSGLSADPYQVMAENSVYYLSQVPGVDAILFGHAHAVFPGKDFADIKGADIEKGTLNGVPXVMPGMWGDHLGVVDLVLNNDSGSWKVTQSKAEARPIYDAAAKKSLAGEDKKLVDILKHDHDATREFVSKPIGKSADNMYSFLALVQDDPTVQVVNMAQKAYAEHYIQGDPDLANLPVLSAAAPFKVGGRKNDPASYVEVEKGQLTFRNAADLYLYPNTLVVVKATGKEVKDWLECSAGQFNQIDPHSSKPQSLINWDGFRTYNFDVIDGVEYQIDVTQPAKYDGECQAINPQAERIKNLTFNGKAIDPNTTFLVVTNNYRAYGGKFAGTGDSHIAFASPDENRSVLAAWISAESKKTGEIHPAVDNNWRLAPIHSDTKLDIRFETSPSDKAAAFIKDKAQYPMQKVATDDIGFAIYQVDLSR

SEQ ID NO: 7269 - DNA, 1743 bp, Enterobacter cloacae
  misc_feature (1481)..(1481): n is a, c, g or t
gtgaacgcactctggcagaaagtgaaccgcgagatggtggcgaagatcctcgccgaactggaatatgaacgcaccctgcgcgccgagccggtttcggcggacaactggcgcatcagtatgggcaacgcgtgctggcagtttcgcgccacgcgtgggatatggggctggctgcatattgaccctgataccctgaccaccaccagcggcgcggcggtcgaagcggaaaacgcgctgctgcaactggccaccgtgctggagatgagcgacgcgcaaacggcggagcacatggaagatctctacgccacgctgcggggtgacatgcagctgttgcaggcgcgtgaaacgctggatgccgatgcgctgatccacctcgacccggacgaactacagtgcctgatgcgcggtcacccgaagtttattttcaacaagggacgccgcggctgggggctggatgccctgcgcctgtacgcgccggaatatcgcgggcgtttccgcctgcactgggtcgccgtgcagcgcgagcgtctggtctggagcagcgacgccgattgcgatattaacgccctgctctccagcgccatggacgatgccgagcgcgagcggttcgacgcccgctggcaggagctggatctggacgacagctggctgccggtgccgctgcacccgtggcagtggcagcaaaaaattgccattcatttcctggcgcagctcgcgcgcggtgagatggtagagctgggtgagttcggcgatgagtatctggcgcagcagtccctgcgcacgctgaccaacgccagccgtcgcgcgccgtatgacatcaagctgccgctgactatctacaacacctcctgctatcgcggtattccgggcaagtatatcgccgccggtccgctggcctcgcgctggctacagcagcagttcgccagcgatgccacgctgattcactccggggcgcaggtgcttggcgaacccgcagccggatatctgtcgcatccgggttataccgcattgcctgaggcgccgtaccgctatcaggagatgctgggggtgatctggcgcgagaacccatcctgctatttacaggatggcgaacaggcggtgctgatggcggctctgatggaaaccgataaccaggggcgcccgctgattgacgcgtggatcaaacgctcggggttaaccgctgacgcatggctggaaaagctgtttgaggcgacggtgatccccttctatcacctgctctgtcgctacggggtggcgctcatcgcccacggccagaacgtcacgctggtgatgaaagattacgttccgcagcgcattttcctgaaggattttcagggcgatatgcgcctggtggatgaagatttcccgcaggcgcagagcctgccggagcaggtaaaagcggtgacggcgcgcctcagcgcggattacatcatccacgacctgcaaaccggcaactttgtcacggtgctgcgctttatatcccncctcaccctgcaatgcggcgtgagcgaaacccgcttctatcagatcctggcgctggtgttacgtcgctatatggccgcccatccggatcttgcggcgcgcttcgccaaattcgacctgtttaagccgcagattattcgcgtgatcctcaacccagtcaaacttaccttctctgaacacgacggcggcagccgcatgctgccgaactacgtctgcgatcttgataaccctctttttctggtctcccgggagtcagcgcaatga

SEQ ID NO: 7270 - protein, 580 aa, Enterobacter cloacae
  misc_feature (494)..(494): Xaa can be any naturally occurring amino acid
MNALWQKVNREMVAKILAELEYERTLRAEPVSADNWRISMGNACWQFRATRGIWGWLHIDPDTLTTTSGAAVEAENALLQLATVLEMSDAQTAEHMEDLYATLRGDMQLLQARETLDADALIHLDPDELQCLMRGHPKFIFNKGRRGWGLDALRLYAPEYRGRFRLHWVAVQRERLVWSSDADCDINALLSSAMDDAERERFDARWQELDLDDSWLPVPLHPWQWQQKIAIHFLAQLARGEMVELGEFGDEYLAQQSLRTLTNASRRAPYDIKLPLTIYNTSCYRGIPGKYIAAGPLASRWLQQQFASDATLIHSGAQVLGEPAAGYLSHPGYTALPEAPYRYQEMLGVIWRENPSCYLQDGEQAVLMAALMETDNQGRPLIDAWIKRSGLTADAWLEKLFEATVIPFYHLLCRYGVALIAHGQNVTLVMKDYVPQRIFLKDFQGDMRLVDEDFPQAQSLPEQVKAVTARLSADYIIHDLQTGNFVTVLRFISXLTLQCGVSETRFYQILALVLRRYMAAHPDLAARFAKFDLFKPQIIRVILNPVKLTFSEHDGGSRMLPNYVCDLDNPLFLVSRESAQ

SEQ ID NO: 7271 - DNA, 948 bp, Enterobacter cloacae
  misc_feature (598)..(598): n is a, c, g or t
atggcaaacgcgaatatcgtccattccggctacggctttcgctgcacggtcacggaacaaaacctgccgctgacgctgggtctcgacggcagcgcggtgctggagcggctgaccgggctcccggacggctggctggtggacgccctcgaccagctgtttgttgccgcgcccgccctgaccggcattaccctgccgtgggcagcctggcaggatgaacctcaggcgcaggcgctgtttagcctcgttcacggggattatctggcgcgtgaaattttctggcagctgccgctgtggctgaaaggcgaacgtccgcaggcgagcggcggaatgcagtttgacgaaagccgtcagctgtacttcccgctgcgccctcaccgcccgcagggtgaggtgtatcgccgttacgatccgcaaattaaacgcaccctgagcttccgcgtggccgatgtggcccaggacggcgagcgctttacccgctggatgaataacccgcgcgtgaacgctttctgggagatggcgggaccgcaggccgagcaggagaactacctgcgccgccagcttgattcgacgtactgctacccggttatcggctgcttcnatgaccagccgttcggctattttgaactctactgggcggcagaagatcgcattggccgccactatcgctggcagccgtttgaccgcgggctgcacatgctggtgggtgaagaaaactggcgcggcgcgcaatacatccgcagctggctgcgcggcctcagccactatctgtatctcgatgaaccgcgcacggcgcgcattgtggcggaaccgcgcttcgacaaccagcgtctgttccgccatctggcgtccgccggtttcgacacggtgaaagagttcgacttcccgcacaaacgctcccgtctgatcatgagcgagcgtcatcacttcttccacgaggtggaactgtga

SEQ ID NO: 7272 - protein, 315 aa, Enterobacter cloacae
  misc_feature (200)..(200): Xaa can be any naturally occurring amino acid
MANANIVHSGYGFRCTVTEQNLPLTLGLDGSAVLERLTGLPDGWLVDALDQLFVAAPALTGITLPWAAWQDEPQAQALFSLVHGDYLAREIFWQLPLWLKGERPQASGGMQFDESRQLYFPLRPHRPQGEVYRRYDPQIKRTLSFRVADVAQDGERFTRWMNNPRVNAFWEMAGPQAEQENYLRRQLDSTYCYPVIGCFXDQPFGYFELYWAAEDRIGRHYRWQPFDRGLHMLVGEENWRGAQYIRSWLRGLSHYLYLDEPRTARIVAEPRFDNQRLFRHLASAGFDTVKEFDFPHKRSRLIMSERHHFFHEVEL

SEQ ID NO: 7273 - DNA, 948 bp, Enterobacter cloacae
  misc_feature (633)..(633): n is a, c, g or t
atggcaaacgcgaatatcgtccattccggctacggctttcgctgcacggtcacggaacaaaacctgccgctgacgctgggtctcgacggcagcgcggtgctggagcggctgaccgggctcccggacggctggctggtggacgccctcgaccagctgtttgttgccgcgcccgccctgaccggcattaccctgccgtgggcagcctggcaggatgaacctcaggcgcaggcgctgtttagcctcgttcacggggattatctggcgcgtgaaattttctggcagctgccgctgtggctgaaaggcgaacgtccgcaggcgagcggcggaatgcagtttgacgaaagccgtcagctgtacttcccgctgcgccctcaccgcccgcagggtgaggtgtatcgccgttacgatccgcaaattaaacgcaccctgagcttccgcgtggccgatgtggcccaggacggcgagcgctttacccgctggatgaataacccgcgcgtgaacgctttctgggagatggcgggaccgcaggccgagcaggagaactacctgcgccgccagcttgattcgacgtactgctacccggttatcggctgcttcgatgaccagccgttcggctattttgaactctactgngcggcagaagatcgcattggccgccactatcgctggcagccgtttgaccgcgggctgcacatgctggtgggtgaagaaaactggcgcggcgcgcaatacatccgcagctggctgcgcggcctcagccactatctgtatctcgatgaaccgcgcacggcgcgcattgtggcggaaccgcgcttcgacaaccagcgtctgttccgccatctggcgtccgccggtttcgacacggtgaaagagttcgacttcccgcacaaacgctcccgtctgatcatgagcgagcgtcatcacttcttccacgaggtggaactgtga

SEQ ID NO: 7274 - protein, 315 aa, Enterobacter cloacae
  misc_feature (211)..(211): Xaa can be any naturally occurring amino acid
MANANIVHSGYGFRCTVTEQNLPLTLGLDGSAVLERLTGLPDGWLVDALDQLFVAAPALTGITLPWAAWQDEPQAQALFSLVHGDYLAREIFWQLPLWLKGERPQASGGMQFDESRQLYFPLRPHRPQGEVYRRYDPQIKRTLSFRVADVAQDGERFTRWMNNPRVNAFWEMAGPQAEQENYLRRQLDSTYCYPVIGCFDDQPFGYFELYXAAEDRIGRHYRWQPFDRGLHMLVGEENWRGAQYIRSWLRGLSHYLYLDEPRTARIVAEPRFDNQRLFRHLASAGFDTVKEFDFPHKRSRLIMSERHHFFHEVEL

SEQ ID NO: 7275 - DNA, 1143 bp, Enterobacter cloacae
  misc_feature (1012)..(1012): n is a, c, g or t
atgccgttggctgccgccggcgtcgggtttggggttaccgtagtgctgctgggcggtctgtgggccctgatgtgttacaccgcgctattattgctggaggtttatcagcatgtccctgccgatactggcttaggctccctggctgcacgctatcttggacgctacgggcagtggatcaccggtttcagcatgatgttcctgatgtacgccctgactgccgcttacatcagcggcgccggggagctgattgcgtcaagtatcaatgacggcttcggtgcgtcactttcaccggaaacaggcgccattgtctttacgctgatcggtggcggcgtggtttgtgcgggcacatcgctggtcgatctgtttaaccgttttttgttcagcgccaaaattctcttcctgattgtgatgctggtgctgctggcaccgcatgttcacaagattaacctgctctccctcccgctggagaaaggtctggcgctttcggccatcccggttattttcacctccttcggttttcacggcagcgtgccgagcatcgtgagctatatgaacggtgatattcgcaagctgcgccgcgtctttgttatcggcagcgccattccgttgattgcttacctgttctggcagctggtgacgctgggcagtattgattccaatacctttatcggcctgatggcagagcattctggtctgaatggattcctggttgccctgcgtaacgtggtggcctcttcacacgtggagctggcggtacatctgtttgcagacctggcgctggcaacctccttcctcggcgtagcgcttggcctgtttgactatatggcggatctgttccagcgtcgcaataccgttgccggacgcttacagacgggggcgatgaccttcctgccgccgctggccttcgcgctcttttacccgcgcgggtttgtgatggcgctggggtatgctggcgtggcgttatcggtactggccctgctgctgccttccctgctggcgtggaagagccgcnagcaacatccgcagcaggggtatcgcgtagcgggcggtacgccaatgctttgcgcggtgtttggttgtggggtggtgattattctggtgcagattttgattgcagcggggatgctgccggaagtgggataa

SEQ ID NO: 7276 - protein, 380 aa, Enterobacter cloacae
  misc_feature (338)..(338): Xaa can be any naturally occurring amino acid
MPLAAAGVGFGVTVVLLGGLWALMCYTALLLLEVYQHVPADTGLGSLAARYLGRYGQWITGFSMMFLMYALTAAYISGAGELIASSINDGFGASLSPETGAIVFTLIGGGVVCAGTSLVDLFNRFLFSAKILFLIVMLVLLAPHVHKINLLSLPLEKGLALSAIPVIFTSFGFHGSVPSIVSYMNGDIRKLRRVFVIGSAIPLIAYLFWQLVTLGSIDSNTFIGLMAEHSGLNGFLVALRNVVASSHVELAVHLFADLALATSFLGVALGLFDYMADLFQRRNTVAGRLQTGAMTFLPPLAFALFYPRGFVMALGYAGVALSVLALLLPSLLAWKSRXQHPQQGYRVAGGTPMLCAVFGCGVVIILVQILIAAGMLPEVG

SEQ ID NO: 7277 - DNA, 972 bp, Enterobacter cloacae complex
  misc_feature (443)..(443): n is a, c, g or t
atgatcgagttcggtaatttctatcagctgattgccaaaaaccacctttcccactggctggaaaccctgcctgcgcaaattgccgcctggcagcgcgatcagcagcatggtctgttgaagcagtggtccaacgccgtggagtttctgcctgaactgacgcctcatcgtctggatttgctgcacagcgtgacggcggagagcgaagagccgctcccggccgggcagatcaaccgcatcgaaacgctgatgcgtaacctgatgccgtggcgcaaagggccgttctcgctgtacggtgtaaatatcaacaccgagtggcgctctgactggaagtgggatcgcgttctgccgcatttatccgacctgaccgggcgcaccattctggacgtgggctgcggtagcggctatcacatgtggcgcatgatcggcgcaggcgcgcatctggncgtcggtatcgatccgatgcagctgttcctgtgccagtttgaagcggtgcgtaagctcctgggtaacgaccagcgtgcgcacctgctgccgctgggtatcgagcaactccctgccctgaaagcgtttgataccgttttctcgatgggtgtgctgtaccaccgtcgttccccgctggagcatctctggcagttgaaagatcagctggtcagcggcggcgaactggtgctggaaacgctggtcatcgaaggcgatgaacatgccgttctggtgccgggcgatcgctatgcgcagatgcgcaacgtttacttcatcccttccgcgctggcgctgaagaactggctggagaaatgtgggtttgtcgatgtacgcatcgccgatgtgtgcgtgacgtcagttgaggaacagcgccgcaccgactggatgatcaccgaatcgctggagcaattcctcgacccggacgatcacagtaaaaccatcgaaggctatccggccccgatgcgtgcggtattgattgcgaccaagccgtag

SEQ ID NO: 7278 - protein, 323 aa, Enterobacter cloacae complex
  misc_feature (148)..(148): Xaa can be any naturally occurring amino acid
MIEFGNFYQLIAKNHLSHWLETLPAQIAAWQRDQQHGLLKQWSNAVEFLPELTPHRLDLLHSVTAESEEPLPAGQINRIETLMRNLMPWRKGPFSLYGVNINTEWRSDWKWDRVLPHLSDLTGRTILDVGCGSGYHMWRMIGAGAHLXVGIDPMQLFLCQFEAVRKLLGNDQRAHLLPLGIEQLPALKAFDTVFSMGVLYHRRSPLEHLWQLKDQLVSGGELVLETLVIEGDEHAVLVPGDRYAQMRNVYFIPSALALKNWLEKCGFVDVRIADVCVTSVEEQRRTDWMITESLEQFLDPDDHSKTIEGYPAPMRAVLIATKP

SEQ ID NO: 7279 - DNA, 651 bp, Enterobacter cloacae
  misc_feature (469)..(469): n is a, c, g or t
atgtcaggctggatgaatcaactgcaatccctgttgggacaaaaaggctcgtcgtccggcgagcagggtctgagcaagctgctggtgccgggtgcgctcggcgggctggccggtttgctggttgccaataaatcatcgcggaaactgcttaccaaatatggtaccggcgcgctgctggcgggcggaggggctattgcaggctccgtcttatggaacaaatacaaagacaaggtgcgcagcgcgcatcaggatgaaccgcagtacgggaagcaggtatcgccgttagatttacgcaccgagcggttgatcctcgccctggtctttgcggccaagagcgacgggcatattgatgccagtgaacgtgccgcaattgaacagcagatgcgggaagcgggcgttgaggaacagggcagggcgctggtggcgcaggccatcgaacagccgcttgatccgcagcgtctggcgcaangcgtgaaaaacgaagaagaggcgctggaactctattttctgagctgtgccgccatcgatatcgatcactttatggagcgcagctacctgaacgccctgggcgatgcgctgaagatcccacaggacgttcgtgagggaattgagcaggatattcagcagcagaagcagaccctcgtgggctag

SEQ ID NO: 7280 - protein, 216 aa, Enterobacter cloacae
  misc_feature (157)..(157): Xaa can be any naturally occurring amino acid
MSGWMNQLQSLLGQKGSSSGEQGLSKLLVPGALGGLAGLLVANKSSRKLLTKYGTGALLAGGGAIAGSVLWNKYKDKVRSAHQDEPQYGKQVSPLDLRTERLILALVFAAKSDGHIDASERAAIEQQMREAGVEEQGRALVAQAIEQPLDPQRLAQXVKNEEEALELYFLSCAAIDIDHFMERSYLNALGDALKIPQDVREGIEQDIQQQKQTLVG

SEQ ID NO: 7281 - DNA, 567 bp, Enterobacter cloacae
  misc_feature (286)..(286): n is a, c, g or t
atgaatatctccgctacgatccttctggcttttggcatgtccatggacgcatttgccgcctctattggtaaaggtgccaccctccataaacctaaattttccgacgccctgcgtaccggtctcatctttggtgctatcgaaacgctgacgccgcttatcggctggggtctggggatgctcgccagccagttcgtgctggagtggaatcactggattgctttcgtgctgctggtgttcctcggcggacgcatggtgattgaaggctttcgtggtaacggcgatgaanatgatgcgccgctgcaacgccacggcttctggcttctggtgacaaccgccatcgcaaccagcctggatgcaatggccgtgggtgtcggtctggcgtttttgcaggtcaatattatcgccaccgcgctggcgattggctgcgccacgctgatcatgtcaacgctggggatgatggtgggtcggttcattggcccgctgttaggcaaacgagccgaaattctgggcggtatcgtgttgatcgggattggtgcccaaatcctttgggcacacttcgcgggttaa

SEQ ID NO: 7282 - protein, 188 aa, Enterobacter cloacae
  misc_feature (96)..(96): Xaa can be any naturally occurring amino acid
MNISATILLAFGMSMDAFAASIGKGATLHKPKFSDALRTGLIFGAIETLTPLIGWGLGMLASQFVLEWNHWIAFVLLVFLGGRMVIEGFRGNGDEXDAPLQRHGFWLLVTTAIATSLDAMAVGVGLAFLQVNIIATALAIGCATLIMSTLGMMVGRFIGPLLGKRAEILGGIVLIGIGAQILWAHFAG

SEQ ID NO: 7283 - DNA, 696 bp, Enterobacter cloacae
  misc_feature (523)..(523): n is a, c, g or t
atgcgaattctggctattgataccgcgacagaggcctgttccgttgccctgtggaacgacggtacgacttttgctcatttcgaagagtgcccacgggaacacacccaacgtattctgcccctggtaaaaaccattttaaccgagggcaacaccgccctgactgacctcgacgcgctggcctacggccgtggtccgggcagctttacgggcgtacgtatcgggattggcattgcgcaggggctggcgctgggcgctgacctgccgatgatcggcgtctcaacgcttgcgaccatggctcagggcgcctggcgcatgaccggcgccacccgcgtgctggctgcgattgatgcccgcatgggggaagtctactgggcggagtacacccgtgacgaaaacggcgtctggcacggcgaagagacggaagcggtgcttaaacctgaagccgtcaccgggcgcctgaagcagctctccggtgagtgggcgacggtcggaaccggctggccggcatggcctgagatggcgnaggacaccggccttacgctggtggacggtaacatgctcctgcctgccgccgaagatatgctgccgattgcctgtcagctgcttgccgcaggaaaaaccgtggcggttgaacatgctgaaccggtttatttacgaaacaccgtcgcgtggaagaaacttcctggccgcgagtga

SEQ ID NO: 7284 - protein, 231 aa, Enterobacter cloacae
  misc_feature (175)..(175): Xaa can be any naturally occurring amino acid
MRILAIDTATEACSVALWNDGTTFAHFEECPREHTQRILPLVKTILTEGNTALTDLDALAYGRGPGSFTGVRIGIGIAQGLALGADLPMIGVSTLATMAQGAWRMTGATRVLAAIDARMGEVYWAEYTRDENGVWHGEETEAVLKPEAVTGRLKQLSGEWATVGTGWPAWPEMAXDTGLTLVDGNMLLPAAEDMLPIACQLLAAGKTVAVEHAEPVYLRNTVAWKKLPGRE

SEQ ID NO: 7285 - DNA, 2616 bp, Enterobacter cloacae
  misc_feature (1276)..(1276): n is a, c, g or t
atgtcagaaattagccgtgccgtgcttttcggcaaactggatacgctgttatttacctctctggaaagcgcgactgccttctgtaagctgcgcggcaacccgtacgttgagctggtgcactggctgcatcagctgatgcagcagcaggatggcgatctgcaacaggtcatccgtcacttcgcccttgatgaacagcagctgacacgcgatatcgtggcggcgctggatgccctgccgcgtggcgcgagttccgtgtctgatctttccgagcatatcgacagcgccgtcgagcgcgcctgggtctacggctcgctgaagtttggcgtcagccgcatccgcggcggccatttgctgatcggcatactgaaaacgtggaatctggctaacgtgctgaaaagcatttcggcgcagttcacccgtcttaacgtcgaggtgctgatcgagcagttcgacgccatttgcgccagcagcaaagagagccagcaggccgccgccgctgcggacgcgcctgccggggcagtaccggctgcgcagggcacgctggcgcagtatggtcaggatctgacggcgcgcgcccgggaagggagaatcgacccggtggtggggcgcgatgaagagatccgccagatggtcgatattctgatgcgtcgtcgccagaacaaccccctgctgaccggggaagccggcgtcgggaaaacggcggtggtggaagggctggcgctgcgtatcgctgacggcgacgtgccggagccgctgcaaaacgttcagctgtggctgctggatatcggcatgcttcaggccggcgcgggcatgaaaggggaatttgaggcgcgcctccaggcgctgattaacgaggtgcagtccagcgccacgccaattattctgtttatcgatgagatccacactctgattggcgctggcggtcagcagggcaccggcgatgctgctaacctgctcaagcctgccctggcgcgcgggcaactgcgcaccatcggcgcgaccacctgggcggaatacaaaaaatacattgagaaagatccggcgctgacccgccgtttccagaccgtacaggttcacgagccggacgaagccaaagccgtgctgatgctgcgcagcaccgtgtcgccgctggaaacccatcatcaggttttactcctcgacgaagcggtcagcgcggcggtgaaactgtcgcatcgctatattcctgcgcgtcagctgccggataaagcggtggcgctgctggacaccgcctgcgcgcgcgtggccgtcagccagngcgcgccgcctgcccagctggaagactgtctgcgtcacctggcggccctggacgtggagctggagattgctgaacgcgaagtgcgcgtgggggcgggcgatccggcgcgtgtggcggccttaaccgccgaacgtgacgcgttcgaaacccagcgcgaagctctggcccgtcgctgggaagaagagcgcacgcgggtgcaggagattatccgtctgcgtgccgcgctgtttgcggcgggtgatgaggatacggctgaactgcgcggccagctggcagaacagcagcaggcgctgaagaccttacagggtgacgaaccgctgctgtttgccgcggtggatgagaacgtggtggctgcggtggtctcagactggaccgggatcccgctgggccggatggtgaaaaatgagattgacgcggtgctgaacctggccgacacgctgaaccagcgggttattggtcagcgtcacggtctggatctgattgcccgtcgggtaaaaacctcgcgggcgaagcttgacgatccgaacaaaccggtcggcgtattcatgctctgcgggccatccggcgtgggtaaaactgaaaccgcgctggcgctggcggagtcgctttacggcggcgagcagaacgttattaccatcaacatgagtgaattccaggaagcgcacaccgtttcgacgttaaaaggtgcgcctccgggctatgtgggctatggtgaaggcggcgtcttaaccgaggccgtgcgccgccgtccctacagcgtggtgctgctggatgaaattgaaaaagcgcacccggacgtgcacgagatcttcttccaggtcttcgacaagggctggatggaggacggcgaagggcgtcacattgatttccgtaacaccattattattctgacctctaacgtcggcaccgacctgatcgcagccatgtgcgccgacccggaactgatgccggagcctgacgcgttaagcggcgccctgcgccagccgctgctggaggtgttcccgcctgcgctgctgggccgcctgctggtggtgccgtattacccgctgagcgacgagatgctggggcagattgtgcgtcttcagctcaggcgcattcagcgtcgtctggaagagaatcacaacattatttctgaatttgacgacagcgtggtcgaacagattgttcagcgctgtaccgaggttgagtcgggcgggcgtatggtggatgcgattctgaccaatacgttgctgcctcagatgagccagattttacttaccgccagccgcagcgacgagcagtaccgacgtctgcatgtcacctgcgagcagggcgagttccactgtcagtttgccgcgtaa

SEQ ID NO: 7286 - protein, 871 aa, Enterobacter cloacae
  misc_feature (426)..(426): Xaa can be any naturally occurring amino acid
MSEISRAVLFGKLDTLLFTSLESATAFCKLRGNPYVELVHWLHQLMQQQDGDLQQVIRHFALDEQQLTRDIVAALDALPRGASSVSDLSEHIDSAVERAWVYGSLKFGVSRIRGGHLLIGILKTWNLANVLKSISAQFTRLNVEVLIEQFDAICASSKESQQAAAAADAPAGAVPAAQGTLAQYGQDLTARAREGRIDPVVGRDEEIRQMVDILMRRRQNNPLLTGEAGVGKTAVVEGLALRIADGDVPEPLQNVQLWLLDIGMLQAGAGMKGEFEARLQALINEVQSSATPIILFIDEIHTLIGAGGQQGTGDAANLLKPALARGQLRTIGATTWAEYKKYIEKDPALTRRFQTVQVHEPDEAKAVLMLRSTVSPLETHHQVLLLDEAVSAAVKLSHRYIPARQLPDKAVALLDTACARVAVSQXAPPAQLEDCLRHLAALDVELEIAEREVRVGAGDPARVAALTAERDAFETQREALARRWEEERTRVQEIIRLRAALFAAGDEDTAELRGQLAEQQQALKTLQGDEPLLFAAVDENVVAAVVSDWTGIPLGRMVKNEIDAVLNLADTLNQRVIGQRHGLDLIARRVKTSRAKLDDPNKPVGVFMLCGPSGVGKTETALALAESLYGGEQNVITINMSEFQEAHTVSTLKGAPPGYVGYGEGGVLTEAVRRRPYSVVLLDEIEKAHPDVHEIFFQVFDKGWMEDGEGRHIDFRNTIIILTSNVGTDLIAAMCADPELMPEPDALSGALRQPLLEVFPPALLGRLLVVPYYPLSDEMLGQIVRLQLRRIQRRLEENHNIISEFDDSVVEQIVQRCTEVESGGRMVDAILTNTLLPQMSQILLTASRSDEQYRRLHVTCEQGEFHCQFAA

SEQ ID NO: 7287 - DNA, 1923 bp, Enterobacter cloacae
  misc_feature (1535)..(1535): n is a, c, g or t
atgctcaaccgaattaccgtccagctcccggttgaggggctgcttttctggaaactctccggccgtgaggcgatgtccgagtcgttcgcgctgacgctgaccctgcttggtacggacgcgcgcattgaccgcagcaagctgctgggccagccggtcacggtgaccatccccacgcagaacctgctcaccccccgctatatcaacggcaaggtgacgcgcgtggcggtgagcgccgtggagctgacgggcacccgctacgcggtgtaccagctgacggtggagccggacctgtggccgatgaagcgcgaccgtaacctgcgtatcttccagggccagacggtaccgcagattgtcaaaaccctgctgggtgagcatcaggttaacctcgaagacaaacttaccggcagctaccgggtgtgggactactgcgtgcagtatcaggaatcgagcctggacttcatcagccgcctgatggagctggaggggattgcgtactacttcagccacgaggccgacaagcataccctggtactgaccgacgccgcgacccagcaccagccgttcagcggctatgaagtcattccttaccaccagacgccgtccggcggcagtacggatgaagagggcatcagtcagtgggcactggaggacagcgtgacgccggggatatacagcctcgacgactatgacttccgcaagccgaacgcgtggctgttccaggcgcagcagaacccggcgtccccgaagccgggcagcatcgacgtgtacgactggccgggccgctttgtggagacaggccatgcggagttctacgcccgaatccgtcaggagcgctggcaggtggagcatcagcagattcaggcgacggccacggcggcgggcattgcgccgggccacatctttaccctgtccaacgcgccgttcttcagtgacaacggggagtatctggtgacggcggcgggttaccacttcgaggagaaccgctacgcgagcggtgagggggaaaccattcaccgcaccgatttcaccgttatcccggcgtcggtgtcctaccgtccggcgcagagcacggcgtggccgcgcacctacggcccgcagacggcgaaagtcgtgggaccgcagggggagagtatctggacggacaaatatggccgcgtgaaggtgaagttccactgggaccgcctggcgaagggcgatgacaccagctcctgctgggtgcgcgtgtcgagcgcctgggcgggccagggctacggcggggtgcaaatcccgcgcgtcggcgatgaggtggtggtggactttatcaacggcgacccggaccgtccgattatcaccggccgcgtatacaacgaagcaagcatgccgccgtgggcgctgccggctgccgcgacgcagatgggctttatgagccgcacgaaagacggttcagtcgacaatgccaacgccctgcgctttgaggacaaggcgggcgcggaacaggtgtggatccaggccgagcggaatctggacaccagcgtcaagaatgatgaaacgcacancgttggcggcgcacgcagccattacgtgaagaaaaatgagcttcatcgcgtggaggctaatcagatccaggccgtgaaaggcggaaccgagatcctgacgggtaaaggcaagctggatgcggcggtagagcagtatgttattgcttccgggacgaagctgcggctggtctcgggcgagagtgctattgagcttaacgctaacggcaaaattaacctgatcggcaaagagttcaacttcttcgttgaaggggacggctatatcaccacgggcggcaagctgcacctgaatacgtcgggcacccaaccgggcacaacggcgccggggtcagggcataaaggggatattgatgcggcggtgcaggagaaatttacgcccccggaagagtaa

SEQ ID NO: 7288 - protein, 640 aa, Enterobacter cloacae
  misc_feature (512)..(512): Xaa can be any naturally occurring amino acid
MLNRITVQLPVEGLLFWKLSGREAMSESFALTLTLLGTDARIDRSKLLGQPVTVTIPTQNLLTPRYINGKVTRVAVSAVELTGTRYAVYQLTVEPDLWPMKRDRNLRIFQGQTVPQIVKTLLGEHQVNLEDKLTGSYRVWDYCVQYQESSLDFISRLMELEGIAYYFSHEADKHTLVLTDAATQHQPFSGYEVIPYHQTPSGGSTDEEGISQWALEDSVTPGIYSLDDYDFRKPNAWLFQAQQNPASPKPGSIDVYDWPGRFVETGHAEFYARIRQERWQVEHQQIQATATAAGIAPGHIFTLSNAPFFSDNGEYLVTAAGYHFEENRYASGEGETIHRTDFTVIPASVSYRPAQSTAWPRTYGPQTAKVVGPQGESIWTDKYGRVKVKFHWDRLAKGDDTSSCWVRVSSAWAGQGYGGVQIPRVGDEVVVDFINGDPDRPIITGRVYNEASMPPWALPAAATQMGFMSRTKDGSVDNANALRFEDKAGAEQVWIQAERNLDTSVKNDETHXVGGARSHYVKKNELHRVEANQIQAVKGGTEILTGKGKLDAAVEQYVIASGTKLRLVSGESAIELNANGKINLIGKEFNFFVEGDGYITTGGKLHLNTSGTQPGTTAPGSGHKGDIDAAVQEKFTPPEE

SEQ ID NO: 7289 - DNA, 4464 bp, Enterobacter cloacae
  misc_feature (1535)..(1535): n is a, c, g or t
atgagcgataacaacgcggcccgtaagggcgacgagattattcactccagcatttttgctgatattaccagcattgtggcggaaggtgccgcctatgcggtgattggcgcggcggtgggcgcggcagcgaccgtcgcggccccactgctgggagccggggccgcagcagcaggcgtggcggcgattggatccagctgtctgttgagcggcattatcggcggggttctggcgaacgtcgccgggatcaccgacgatatcagcaacgccgctgaagggctgggtaacgcgcttttcccgccgtcgcccgcgggcaaaatcaccaccggttcgagcaatgttctgacaaataaacttcccgctgcacgcgccgccgggacgttaacccctgccgataccccgtcccctgagccgcagtcgccgggcagctttgccgactacgcgggcatgctgctctccgctgccggacagttcggcagcgagatgtggcagccgagcgtcgcctctgccgccgcagggacctcgccgctggaagaagacaaggtggcgtgtgataaacactccgggccgcagtatctggcggaaggctcgaaaagcgtcttcatcaacggacagcctgcggtgcgcgcaaaagatcgcaccacctgcgagggcaccgtttccgacgacgtctccccgaacgtgatcataggcggcgacacgctcacggtccgcgatatcaaaagcggtaaaacgccgggtctggcgctggggatgattgcgctctccctgctgcgcgggcggccaggcaagatcctgaaaaacatgccctgcgcgctggctgctgccggtggcgggatgctggcggatatggccgtcaacgccgtgttcggctcctcgcacccggttcacgccgctaccggcgtgaaggtgctgaatgacgacgacgaactcgatttctcgctgccagggcgctttccgctgcgctggcagcgcagctacaacagcctgaccacccgcgaagggcttttcggtctgggctgggctaccacctttgacagctatctggcgctggaagaaaacaacgccacctggttcgatgaaaccgggcgcgagctgagctttgaactgccgccggtcgaccgcgcgttttacagcatcagcgaaggcatcattatccgccgcaatgagagcggcgacgtggcgatagctgacgatgacggcgcggtgtggcgtctgtataaaccgacccgcgctaacccctccatcctgcgcctggcctccctcagcgacgagtacggcaacgcgttgctgacggaatgggatgagcacgggcggctggtcggtctgcacgatgagccgcgagcgatcgatgtcaccctgcgctatgacgatgaacgtttcccgcagcgcgttaccgctgccagccattttgacggcaaccagacatggccgctgatgcagtgggggtacgacgcgcgcggccagctggccagcgcaacggatgcctccggcgtggtaacccgtgaataccgttataacgatgatggcctgatggnctggcaccgtctgccgggcgggctggagagcgaataccgctggcaaaaattcgaccactggcgcgtggtggaaaatcgcaccagcaccggcgacggctgtcgctttacctacgatttagccgccgggctgacgaccgtcgatcactacgacggtcagacgcgaaagcattactggaacgcgcaaaacctgattgttcgctacgttgacgagcgcggtgagaactggcgctacgagtgggatgacaacgaactcctcacgcgtcgcatcgatccgctgggtaatgccgttaccttcgtctatgacgagatgggcaaccgggtgcaggagatcgacgccgacggcaatacccgcaccaccacctggctggagcaccgtgcgcttccggcgtccatcatcgaagccgacggtagcgccacccggttcctgtatgacgaacatcacgggctgaaacgcgtggtggatccgatggggcagaccacgctgctgcgtcgggacgagtttggtcaggttgtggaagaagttgatgccgccgggaacagccgctaccaggagtacaacgaagccgggcagatggtgcgtgcgacggactgttctggccgcgtgacacaataccgttatcatccgctgggctggctggtggctgagataagcgccgacggcgaagagacgcgttaccgctacgacgccgcggggcgtccggtgcagctcgaccgatcagaaggctggaccgagtcgctcaaatggaacgaacgtggtctgccggtgaagcatgcgggcgccgacgggaaagagagcgagttcagatacgacgaggcagggcgcttaaccgccacccgcaatacgcagggtgaagaggtgcgccgccgctgggacagccgcggacggctggtcgccatggaaaacgaaaacggcgaagcgtatcagttccgctggggcgcagactcgctgctgctggaagaggtgggactcgatggcgtggcctcgcagtatcgctacgatgcctgcggacgtacgatagcgcgcacctttgccgccggacatccggaggccatcacccacgctttcgcctggagcgcgagcggccagctggtcgcccgcaccacgccggaggggcagacccgctaccactacaccccgtccggccttctgagccggattgggctgcatcccgcgctttcagaagatgcctggagcgccgaggccgagcaggagcttgtgtttgagtatgacgcgctcgggcgcgtcacgcgcgaaacgggcgaacacggggagctggcgtgggagtatgacgcgctgggtaaccgcacctccgtcacgctgcccgatggtcgggagctgaaacagttctactacggtagcgggcatctgctcagcattgcccttgataagctgtcggtctccgactttacccgcgacgaactccaccgtgaaaccagccgtacgcaggggctgctgaccacccgcagcgaatacgaccgccttggccgactgcatcgccgggacgtctttaccggcaatgcccagcgcccgtcgccgcgccgctggtcccgccgctgggattacgactatcgcaataacctggtgcgggaagagcgggacgataacccgttcagctggtaccgctggcagtacgacagcgccggacgtctgctggttcaggacggcacgctgcccggccaggagcagtggcgctgggatgctgccggtaacccgctcgaaggctctgctgagaaggtcacgcacaaccgtctgacgcacctcaacggcattcgctggcgctatgacatccacggccgcaccgtggagaaggataacggccagacccgctggaactaccgctacgacggcgagcaccgcctgacggaggtcatcagccagccgcgggaccgcaacaggccgcagacgcaggtcagcttccgctatgacccgctcgggcgacgcatcagcaaaacgcgccgccagatgctgggcggccagccaaccggcaagccggtcaccacccggtttgtctgggaagggttccggctgttgcaggaggtgcacggggatgtgccgctcacctacgtctacagcgatcaggacagctacgatccgctggcacgtattgacggcgttgatgccccggaattcttctggttccactgccagcccaacggcacgccggagcggatgacggatagcgaagggcaggtgcgatgggaaggggtgaacagcgcctggggcaaactgctgcgggaaagcgagacgcaggtatcaggatattcccagaacctgcgtatgcaggggcaatacctggaccgtgagacagggctgcactacaatctgttccggtattacgacccggactgcggaaggtttacgcagcaggacccgatagggctggcgggagggattaacctttaccagtatgcgccgaatgcgctgggttgggtggatccattaggtttacgatgtgggcgaactaatacttggaatgattttcagcggcagcataaaggtcgtttcaaatcatcaactgaagcggcttctgcttataacaaattagtgaatgaacaatcgccttggccattaaatgagcctcctttagatgcaacattagtcccagggactcgagtaaaaatggccgtatctccaggccagccagcgacgagacctggagggtttgctacatttgacgatattcctaatacttcatatgttagaaatgagctcgctgtgaagatggaatggaaaccggatattgatagagtaataacttatgaagttaagaaaccattaccagttaaaattggtgcagttggacctcaagttgataaaggtgcgaatgtatatctgcctggcggcggttcacaagtcgaaatggctgtgccacctgcagaacgcatgaattatttggaagttattgacgagtcgttgctcaagccctaa

SEQ ID NO: 7290 - protein, 1487 aa, Enterobacter cloacae
  misc_feature (512)..(512): Xaa can be any naturally occurring amino acid
MSDNNAARKGDEIIHSSIFADITSIVAEGAAYAVIGAAVGAAATVAAPLLGAGAAAAGVAAIGSSCLLSGIIGGVLANVAGITDDISNAAEGLGNALFPPSPAGKITTGSSNVLTNKLPAARAAGTLTPADTPSPEPQSPGSFADYAGMLLSAAGQFGSEMWQPSVASAAAGTSPLEEDKVACDKHSGPQYLAEGSKSVFINGQPAVRAKDRTTCEGTVSDDVSPNVIIGGDTLTVRDIKSGKTPGLALGMIALSLLRGRPGKILKNMPCALAAAGGGMLADMAVNAVFGSSHPVHAATGVKVLNDDDELDFSLPGRFPLRWQRSYNSLTTREGLFGLGWATTFDSYLALEENNATWFDETGRELSFELPPVDRAFYSISEGIIIRRNESGDVAIADDDGAVWRLYKPTRANPSILRLASLSDEYGNALLTEWDEHGRLVGLHDEPRAIDVTLRYDDERFPQRVTAASHFDGNQTWPLMQWGYDARGQLASATDASGVVTREYRYNDDGLMXWHRLPGGLESEYRWQKFDHWRVVENRTSTGDGCRFTYDLAAGLTTVDHYDGQTRKHYWNAQNLIVRYVDERGENWRYEWDDNELLTRRIDPLGNAVTFVYDEMGNRVQEIDADGNTRTTTWLEHRALPASIIEADGSATRFLYDEHHGLKRVVDPMGQTTLLRRDEFGQVVEEVDAAGNSRYQEYNEAGQMVRATDCSGRVTQYRYHPLGWLVAEISADGEETRYRYDAAGRPVQLDRSEGWTESLKWNERGLPVKHAGADGKESEFRYDEAGRLTATRNTQGEEVRRRWDSRGRLVAMENENGEAYQFRWGADSLLLEEVGLDGVASQYRYDACGRTIARTFAAGHPEAITHAFAWSASGQLVARTTPEGQTRYHYTPSGLLSRIGLHPALSEDAWSAEAEQELVFEYDALGRVTRETGEHGELAWEYDALGNRTSVTLPDGRELKQFYYGSGHLLSIALDKLSVSDFTRDELHRETSRTQGLLTTRSEYDRLGRLHRRDVFTGNAQRPSPRRWSRRWDYDYRNNLVREERDDNPFSWYRWQYDSAGRLLVQDGTLPGQEQWRWDAAGNPLEGSAEKVTHNRLTHLNGIRWRYDIHGRTVEKDNGQTRWNYRYDGEHRLTEVISQPRDRNRPQTQVSFRYDPLGRRISKTRRQMLGGQPTGKPVTTRFVWEGFRLLQEVHGDVPLTYVYSDQDSYDPLARIDGVDAPEFFWFHCQPNGTPERMTDSEGQVRWEGVNSAWGKLLRESETQVSGYSQNLRMQGQYLDRETGLHYNLFRYYDPDCGRFTQQDPIGLAGGINLYQYAPNALGWVDPLGLRCGRTNTWNDFQRQHKGRFKSSTEAASAYNKLVNEQSPWPLNEPPLDATLVPGTRVKMAVSPGQPATRPGGFATFDDIPNTSYVRNELAVKMEWKPDIDRVITYEVKKPLPVKIGAVGPQVDKGANVYLPGGGSQVEMAVPPAERMNYLEVIDESLLKP

SEQ ID NO: 7291 - DNA, 3987 bp, Enterobacter cloacae
  misc_feature (1487)..(1487): n is a, c, g or t
atgcgactggtcattatcggtaatggtatggcggcagcccggctgattgcgtcgctcaccgggcgtgttcccggtcgtttcgctgtcaccgtcatcggtgacgagccggagcaggcgtacaaccgcatccagctttcgccggtgctgggtggcgaaaagcaggcggagcacatctgtctgcacgatgaagactggtacacggcacgaggcgtgacggtgctgcgaggagaaaaggcgctcgcagtagacgtcaacgcgcgtgaagtgcatacctctgctcgcacgctgggctgggatgcgctggtgtttgccaccgggtctacccctgtcgtgccgccgatccccgggggcgatgcgccgcatgtgttcacctttcgcaccctggcagagacccgcgccatccggaacctctccggaccggcggtagtgctgggcggcggcgtactcggcgtggaggccgcggcagcgctggcgcgcaacggtgacaacgtcacgctcgtgcatcgcggtccgtggctgatggaacagcagctggatcagcaggcgggactgctgctggaagaggcgctggcggtgcggggcgtacgctgtgaactcgcctccggcatcaccgccatcgctgacgatgccgtgacgttgctcgacggacgccgcatcgccgccacgcgcgtggtgctggccacgggcgtgcagcccaacgttgcgctggcaaaagccagcggcattcgctgcgcgcgcggcatcgtggtggatcagcagatgcaaacctccgtgccggatacctacgccatcggcgagtgctgcgaaattgacggccagacgtttggcctggtcgccccctgtctggcgcaggcggatattcttgccgcgcggctggccggggaggtcaccgcgccgtttaccctgaccgacaacggcgtgcgccttaaggtgaccggcgtggcgctgttcagcctcggacgcgcgacggcgcaggcggacgatgtggtctggagttcatgggatccgctcacccgtcactatcgacgtttactgatccatcagggggcgctggctggcgtgctgctgatgggtgactgccgcagcgcggcaacctttaccgatttactggcaacggctgcgcccgcccacgcggactggctgttcgatcgtttcacaacgcaaccgcaggttgcaggacagaacgctatgacaaaacctactctggtggtggttgggcacggtatggtcggccatcatttcctcgaagactgcgttaaccgcaatttgcatcagcagtatcagattattgtttttggcgaagagcgctatgccgcctatgaccgcgtgcatctgtcggaatattttggcggacgcagcgcggactcgctctcgctggtggcgggggcgttctttgccgataacggcattgagctgcgcctctcgcagcagatcgtcgctatcgatcgtgatgcacacgtagtgcgcaccgccagtggccatgaganccactgggacaaactggtgctggcgaccggctcgtacccgttcgtcccgcccgttccgggcaacgatctgccggggtgttttgtctaccgcaccctcgacgatctggacaacattgcggcccatgcggcaggctctcgccgcggtgtggtgattggcggcggcctgctggggctggaggcggcaaatgcgcttaagcagctcgggctggaaactcacgtggtggagtttgcgccgaacctgatggcggtgcagctcgacagcgacggcgcggcaatgctgcgcaagaaaattgaggcgctgggcgtaggagtacacaccagtaaatcgacgacggagattgccaccgcagacaacgggctggtgctgcgctttgccgatggcgagcagctggaaacggacatggtggtcttctctgccggtattcggccgcaggacgcgctggcgcgcagcagcgggctggctgtcggcgagcgcggcgggatctgcattgacgacggctgccggacctccgatcaggacgtgcttgccatcggcgaatgcgcgctgtgggaggggaaaatctttggcctggtggcaccaggctaccagatggcgcgcgtggccgccgctgtgctggcgggtgaggagaagcgcttcaccggcgcggatatgagtaccaaactcaagttgctgggcgtggatgtggcgtcgtttggcgatgcccacgggcgcacgccgggggcgctgagctaccagtggacgcacgggccgcagcaaatctacaaaaagattgtggtcagccacgacagcaaaaccctgctgggtggcgtgctggtgggcgatgccagcgaatacgccacgctggtgcagatgatgctcaacggcatcagcctgccaaaagaaccggaaacgctgatcttacccgcgtcgtcaggcggcgcgccgaaagcgctgggcgtggcggcgctgccggaaagcgcgcagatctgttcgtgtcataacgtcagcaaaggggatatctgccaggcggtaagcgcgggtgcgacggatatcggcgccattaagcagtgcaccaaagcggcgaccggctgcggaggctgtagcgcgctggtgaagcaggtgatggagttccagcttgcggagcagggcgtggaggtgaagaaagatatctgcgaacacttcccgtactcgcgtcaggagatttaccacctggtgcgcgtcaaccatatccgcaccttcgaccagcttatcagccgctacggtcaggggcacggatgcgagatctgtaagccgctggtggggtcggtattggcttcctgctggaacgagtatctgctgaaaccggcgcatctgccgttgcaggacaccaacgaccgctatttcgccaatattcagaaggacggaacctactccatcgtcccgcggatgcctgcgggtgaagtgaccgccgacgggctgatcgccatcggccagatcgcgaaacgctatagcctttacagcaaaattaccggcgggcagcgtattgacctgtttggcgccacgctcgagcagttgcctgaaatctggcaggcgctggtagaggccgggtttgagaccggacatgcttacgggaaatccctgcgcacggtgaaatcctgcgtcgggtcgacctggtgccgctacggcgtgcaggattccaccggcctcgcggtcaggctggagcaccgctacaaggggctgcgcgcgccgcacaaaatcaaaatggcggtctccggctgtacccgtgagtgcgcagaggcgcagagcaaagacgtaggggtgattgccacggacaaaggctggaacctctatctgtgcggcaacggcgggatgaagccgcgccacgcgaatctcttcgccagcgatctggacgacgaaacgctgatccgcaccgttgaccgtttcctgatgttctacattcgcacggcagatcgtctgcaacgcaccagtacctggatggataacctggaaggcggcctcgactatctgcgcgaggtgatcctcaacgacagcctggggatcgcccacgagctggagcaggagatggcccgggtggtggagacttaccagtgcgaatggcaaaccacccttaacgatcctgaccgcctggcgctgttccgcaccgcggtgaacgtccccgccgcggaggagaacaagcgctggcaggaaatttgtaatatcgacgagatcccggagcaggcgggcattggcgcgcatcttgggcgcaaaccgattgcgctgttccgctttggcaaaaccgtttatgccctcgacgatcgggagccgggcagccgcgcgaacgtgctctcacgcggcatcctcggcgatgcggcgggggaaccggtggtgatctcgccgctctacaagcaacgtattcgtctgcgcgacgggtgtcaggctgagagcggggcgcctgcggtgcgtgcctggccggtaaaaattgaaaacggcaaggtgtgggttggaaatgaagagctggtgatgcgcgcggaggcctcatga

SEQ ID NO: 7292 - protein, 1328 aa, Enterobacter cloacae
  misc_feature (496)..(496): Xaa can be any naturally occurring amino acid
MRLVIIGNGMAAARLIASLTGRVPGRFAVTVIGDEPEQAYNRIQLSPVLGGEKQAEHICLHDEDWYTARGVTVLRGEKALAVDVNAREVHTSARTLGWDALVFATGSTPVVPPIPGGDAPHVFTFRTLAETRAIRNLSGPAVVLGGGVLGVEAAAALARNGDNVTLVHRGPWLMEQQLDQQAGLLLEEALAVRGVRCELASGITAIADDAVTLLDGRRIAATRVVLATGVQPNVALAKASGIRCARGIVVDQQMQTSVPDTYAIGECCEIDGQTFGLVAPCLAQADILAARLAGEVTAPFTLTDNGVRLKVTGVALFSLGRATAQADDVVWSSWDPLTRHYRRLLIHQGALAGVLLMGDCRSAATFTDLLATAAPAHADWLFDRFTTQPQVAGQNAMTKPTLVVVGHGMVGHHFLEDCVNRNLHQQYQIIVFGEERYAAYDRVHLSEYFGGRSADSLSLVAGAFFADNGIELRLSQQIVAIDRDAHVVRTASGHEXHWDKLVLATGSYPFVPPVPGNDLPGCFVYRTLDDLDNIAAHAAGSRRGVVIGGGLLGLEAANALKQLGLETHVVEFAPNLMAVQLDSDGAAMLRKKIEALGVGVHTSKSTTEIATADNGLVLRFADGEQLETDMVVFSAGIRPQDALARSSGLAVGERGGICIDDGCRTSDQDVLAIGECALWEGKIFGLVAPGYQMARVAAAVLAGEEKRFTGADMSTKLKLLGVDVASFGDAHGRTPGALSYQWTHGPQQIYKKIVVSHDSKTLLGGVLVGDASEYATLVQMMLNGISLPKEPETLILPASSGGAPKALGVAALPESAQICSCHNVSKGDICQAVSAGATDIGAIKQCTKAATGCGGCSALVKQVMEFQLAEQGVEVKKDICEHFPYSRQEIYHLVRVNHIRTFDQLISRYGQGHGCEICKPLVGSVLASCWNEYLLKPAHLPLQDTNDRYFANIQKDGTYSIVPRMPAGEVTADGLIAIGQIAKRYSLYSKITGGQRIDLFGATLEQLPEIWQALVEAGFETGHAYGKSLRTVKSCVGSTWCRYGVQDSTGLAVRLEHRYKGLRAPHKIKMAVSGCTRECAEAQSKDVGVIATDKGWNLYLCGNGGMKPRHANLFASDLDDETLIRTVDRFLMFYIRTADRLQRTSTWMDNLEGGLDYLREVILNDSLGIAHELEQEMARVVETYQCEWQTTLNDPDRLALFRTAVNVPAAEENKRWQEICNIDEIPEQAGIGAHLGRKPIALFRFGKTVYALDDREPGSRANVLSRGILGDAAGEPVVISPLYKQRIRLRDGCQAESGAPAVRAWPVKIENGKVWVGNEELVMRAEAS

SEQ ID NO: 7293 - DNA, 915 bp, Enterobacter cloacae
  misc_feature (46)..(46): n is a, c, g or t
atgagtactctactaagaagtgctgcgctcgtcctgtgcgcagggntgagctgcgcgcaagcaacagaatcagccaaacagtgggaatttaatattggcgccatgtatgaaattgaaaacgtcgaaggtcaggccgacgataaagatggattatatgaaccctccgtgtggtttaatgccacatgggatgcctggaccatttcgctggctatgtatcaggaagggccggtcgattacagtagcatgacgcgcggcacctatttcgatcgtcctgaagtagaattacgctatcgttttatcggcaccgatgattttacgttcggcctgaccggtggcttccgtaattatggctatcactttaaggatgagcatggtgctaaagacggtagtgctaatatgcagcgctataaagttcagcctgactgggatattaaactaaccgacgactggcgttttggcggctggtttgccatgtatcagtttgccaacgatctggaaaaaaccggctattctgacagccgcgtcgagaccgaaaccggttttacctggacaattaacgaaacggtctcggcaaaagttaattactatttagagcgcggttttaatatggacggctcacgaaataacggtgaattctccactcaggaaattcgcgcttatctgccgatttcattgggtcagacgacgctaacgccttatacccgtctgggactcgatcgctggtcaaactgggactggcaagacgatcctgagcgtgaaggacatgatttcaaccgtttgggtatgctgtacgcctatgattttaacaatggtttatccatgacgctggaatatgcctacgaatgggaaaaccatgacgaaggggaaagtgaccgcttccactatgccggtatcggcgtgaattacgcgttttga

SEQ ID NO: 7294 - protein, 304 aa, Enterobacter cloacae
  misc_feature (16)..(16): Xaa can be any naturally occurring amino acid
MSTLLRSAALVLCAGXSCAQATESAKQWEFNIGAMYEIENVEGQADDKDGLYEPSVWFNATWDAWTISLAMYQEGPVDYSSMTRGTYFDRPEVELRYRFIGTDDFTFGLTGGFRNYGYHFKDEHGAKDGSANMQRYKVQPDWDIKLTDDWRFGGWFAMYQFANDLEKTGYSDSRVETETGFTWTINETVSAKVNYYLERGFNMDGSRNNGEFSTQEIRAYLPISLGQTTLTPYTRLGLDRWSNWDWQDDPEREGHDFNRLGMLYAYDFNNGLSMTLEYAYEWENHDEGESDRFHYAGIGVNYAF

SEQ ID NO: 7295 - DNA, 1053 bp, Enterobacter cloacae
  misc_feature (613)..(613): n is a, c, g or t
atgacggaaccgttaaaaccacgcattgattttaccggccagcttgagcagtccccgcatgaggcgtttaaaacggcgcaaaccttcagcggctcgcaggccgacaactttgctcccgtgctggcagacgagccgttggttgaagaggggcaggcggaagcggttgttgatgcggcactgcgcccgaaacgcagcctgtggcgcaagatggtgaccgccgggttagccctttttggtgtgagcgtaatcggccagggcgtgcagtggggcatcaatgcctggcaaacgcaggactgggtggcgctggggggatgcgccgccggggcgttgattgttggtgcgggcgttggctcggtcgtcaccgagtggcgtcgcctctggcgtttgcgtcagcgtgcccacgaacgcgatgaggcgcgggatctgctgcacagtcacggcacaggaaaagggcgtgctttttgtgaaaagcttggggctcaggccgggattgatcactctcacccggcgcttcagcgctggtatgcggcgatccacgaaacccagaatgaccaggaagtggtcacgctctatgcccacattgttcagccggtgctggatgcgcaggctcgtngtgagatcagccgctcggcggcggaatctaccctgatgatcgccgtcagtccgctggcgatggtggacatggcctttatcgcctggcgcaacctgcgcctgatcaaccgcatcgccagactgtatggcattgagcttggctattacagtcggctgcgcctgttcaaactggtattgctgaatatcgccttcgccggggcaagcgaactggtgcgggaggtcgggatggactggatgtcgcaggatcttgcggcccgtctctctgcccgggcggcgcaggggattggtgccggtctgcttacggcacgcctgggcatcaaagcgatggaggtttgtcgtccactcccctggatcgatggcgataagccgcggctgggggatttccgtcgcgaattgattggccagcttaaagagacgctcaataaaaaacctgctcagtga

SEQ ID NO: 7296 - protein, 350 aa, Enterobacter cloacae
  misc_feature (205)..(205): Xaa can be any naturally occurring amino acid
MTEPLKPRIDFTGQLEQSPHEAFKTAQTFSGSQADNFAPVLADEPLVEEGQAEAVVDAALRPKRSLWRKMVTAGLALFGVSVIGQGVQWGINAWQTQDWVALGGCAAGALIVGAGVGSVVTEWRRLWRLRQRAHERDEARDLLHSHGTGKGRAFCEKLGAQAGIDHSHPALQRWYAAIHETQNDQEVVTLYAHIVQPVLDAQARXEISRSAAESTLMIAVSPLAMVDMAFIAWRNLRLINRIARLYGIELGYYSRLRLFKLVLLNIAFAGASELVREVGMDWMSQDLAARLSARAAQGIGAGLLTARLGIKAMEVCRPLPWIDGDKPRLGDFRRELIGQLKETLNKKPAQ

SEQ ID NO: 7297 - DNA, 747 bp, Enterobacter asburiae
  misc_feature (692)..(692): n is a, c, g or t
atgttaagcattaaagatttacaggttagcgtggaagagaaagagatcctgcgtggcctcaattttgacgtcaaaccgggtgaagttcacgccatcatggggccaaacggctccgggaaaagtacgctttcagcgacgctggcaggacgcgaagattatgaagttaccagcggctccgttgagtttaacggcaaagatctgctggagatgtcgccggaagagcgtgccggcgagggcatctttatggccttccagtatccggtggaaattccgggcgtcagcaaccagttcttcctgcaaaccgcgctgaacgcggtgcgcaagtatcgcggccttgaggcgctggatcgctttgacttccaggatctgatggaagaaaagattaagctgctgaaaatgccggaaaatctgttgacccgctcggtaaacgtgggtttctccggcggtgagaagaaacgtaacgatattctgcaaatggcggttctggaaccggcgctgtgcattctcgatgagaccgattcagggctggatatcgatgccctgaagatcgttgccgacggggtgaactccctgcgtgacggcaaccgctcatttatcatcgtgactcactatcagcgaattctggattacatcaaaccggactatgtccacgtgctttaccagggacgcattgtgaaatccggtgactttangctggttaaacaactggaggagcagggttatggctggcttaccgaacagcagtaa

SEQ ID NO: 7298 - protein, 248 aa, Enterobacter asburiae
  misc_feature (231)..(231): Xaa can be any naturally occurring amino acid
MLSIKDLQVSVEEKEILRGLNFDVKPGEVHAIMGPNGSGKSTLSATLAGREDYEVTSGSVEFNGKDLLEMSPEERAGEGIFMAFQYPVEIPGVSNQFFLQTALNAVRKYRGLEALDRFDFQDLMEEKIKLLKMPENLLTRSVNVGFSGGEKKRNDILQMAVLEPALCILDETDSGLDIDALKIVADGVNSLRDGNRSFIIVTHYQRILDYIKPDYVHVLYQGRIVKSGDFXLVKQLEEQGYGWLTEQQ

SEQ ID NO: 7299 - DNA, 1119 bp, Klebsiella michiganensis
  misc_feature (13)..(13): n is a, c, g or t
ttgaatacacaancccgttccctttcaccgctggtgcaactggaacgaattcgtaaaagtttcgatggcaaagatgtcatttccgaccttaatctgaccatcaatgacggtgagtttctcacgctgctcggcccctccggctgcggcaaaaccaccgtcctgcgccttatcgccgggctggaaagcgtcgataacggccatatccatcttgagaaccaggacataacccaggttccagccgaagatcgccacgtcaataccgtctttcagagctatgccctgttcccgcacatgaccgtgtttgagaacgtggcgtttggcctgcggatgcaaaaaacaccggccagcgagatcccacctcgggttaccgaagccctgcgcatggtacagctggaggcgttcgcccagcgcaagccgcatcaactttccggtggtcagcagcagcgtgtggccattgcccgcgccgtggtcaacaaacctcgcctgctcctgctggatgaatccctctctgcgctggactacaagctgcgcaagcagatgcagaacgagctgaaagcgcttcagcgtaagctcggcatcacgttcgtgtttgtcacgcacgatcaggaagaagccctgaccatgtcagaccgtatcgtggtgatgcgcgacggcaagattgagcaggatggcaccccgcgtgaaatttacgaagagccgaaaaacctgttcgtcgccagctttattggcgaaatcaatatctttaacgccacggtgatcgagcatctggacgatcggcgcgttcgcgcaaatgtggaaggccgcgaatgcaatattaccgtcaactttgccgtcgagaagggtcaaaagctcaacgtcctgctgcgcccggaagatctccgcgttgatgagatccacgacacggctgacgtcgaaggtctgatcggttacgttcgcgaacgcaactacaaagggatgaccctcgaatccgttgtggaactggaaaacggcaaaatggtgatggtcagcgagttctttaacgaggacgatccggacttcgaccattcgctggatcagaaaatggtcatcaactgggtagaaagctgggaggttgtactggctgatgaagaacacaagtaa

SEQ ID NO: 7300 - protein, 372 aa, Klebsiella michiganensis
  misc_feature (5)..(5): Xaa can be any naturally occurring amino acid
MNTQXRSLSPLVQLERIRKSFDGKDVISDLNLTINDGEFLTLLGPSGCGKTTVLRLIAGLESVDNGHIHLENQDITQVPAEDRHVNTVFQSYALFPHMTVFENVAFGLRMQKTPASEIPPRVTEALRMVQLEAFAQRKPHQLSGGQQQRVAIARAVVNKPRLLLLDESLSALDYKLRKQMQNELKALQRKLGITFVFVTHDQEEALTMSDRIVVMRDGKIEQDGTPREIYEEPKNLFVASFIGEINIFNATVIEHLDDRRVRANVEGRECNITVNFAVEKGQKLNVLLRPEDLRVDEIHDTADVEGLIGYVRERNYKGMTLESVVELENGKMVMVSEFFNEDDPDFDHSLDQKMVINWVESWEVVLADEEHK

SEQ ID NO: 7301 - DNA, 615 bp, Enterobacter cloacae
  misc_feature (94)..(94): n is a, c, g or t
atgacagacaacctgcaactcacacacctggtcgaggcctgccgctggattggcgctaaaggctgggcgcccgctaccggcggcaatatgtccntgcgtcaggatgaacacctgtgctggctgagcgaatccggaaaagataaaggcagcctgaccaccgccgattttctacaggttgaaatcgccaccaaccgtgcgccgtctggccgtaaaccgtcggcagagaccgggctgcataccctcatctatcgcctgtttcccgaggctaacgccgtcctgcacgttcacactgtcaatgccacggtgctgtcgcgtctggtcaacgaggccgagctgaagatcaccggtttcgagatgcaaaaatcccttaccgggcagaccacgcaccaggatacggtggccatcccggtgtttgataacgaccaggacatcgacgccctcgcctcgcgcatcgcccattacgcgcaggaacgcccgcttaattatggttttcttctgcgcggtcatggcttaacctgctggggacgcgacgtggccgaagcccgccgtcatctggaagggttagaattcttatttgaatgcgaaatgcgtttacgacaatgggagagagtatga

SEQ ID NO: 7302 - protein, 204 aa, Enterobacter cloacae
  misc_feature (32)..(32): Xaa can be any naturally occurring amino acid
MTDNLQLTHLVEACRWIGAKGWAPATGGNMSXRQDEHLCWLSESGKDKGSLTTADFLQVEIATNRAPSGRKPSAETGLHTLIYRLFPEANAVLHVHTVNATVLSRLVNEAELKITGFEMQKSLTGQTTHQDTVAIPVFDNDQDIDALASRIAHYAQERPLNYGFLLRGHGLTCWGRDVAEARRHLEGLEFLFECEMRLRQWERV

SEQ ID NO: 7303 - DNA, 1017 bp, Enterobacter cloacae complex
  misc_feature (1000)..(1000): n is a, c, g or t
atgcagacattacagacgaccagcctgcgggtggcggataatcagctctttattctcgaccagcaggcgcttccacaggagaaacgctggctggatgcctcgacggtcgaggcgctggtcgggcacatccacgccctgcgggtgcgcggcgcgccgctgattggactctctgcaagcctgctgctggcgctgttagcggaaagcggcaaaagccgcgacgagctggcggtggcgctggaaaccctgcgcgcctcccgcccgacggcggtgaacctgatgaataacctcgatcgcatgaagattgcgctgtggcaggaagattatattccggcgctggtggctgaagcgctgcggctgattgacgaagacaaacggctctgtgacgctattgccagtgcgggcagcgcgctggtgaagcccggcagccgtctgctgacccactgcaacaccggcgggctggcgacggcgggcgtcggtaccgcgctgggggtgattgctcgcgcgcatcaggaaggcaaggtaagcaacgtctgggtggatgaaacccgtccgctattgcagggcggcaggctgaccgcgtgggaactcggcgagctgggcgtaccgtatcagctgattaccgactccatggccgccagcctgatggcaaaagggcaggtggacgccgtgtgggtgggtgcagaccgcattgccgccaacggcgacgtggcgaacaaaatcggcacctattccctggcggtgctggcgaagtttcacggcattccgttctacgtcgctgccccgcaaacgaccctcgacccggactgcccgaacggtgacgcaatcccgattgagcagcgcgcggccagtgaagtgacgggcgtggcggggagctttggcgcggtgcagtgggcgccgcaagaggcgcaggtctataacccggcgtttgacgtcacccccgcctcgctgattagcggctgggtgctggatacaggcgtggtcacaccggacgaggtagcgnaagggaaatttgcctga

SEQ ID NO: 7304 - protein, 338 aa, Enterobacter cloacae complex
  misc_feature (334)..(334): Xaa can be any naturally occurring amino acid
MQTLQTTSLRVADNQLFILDQQALPQEKRWLDASTVEALVGHIHALRVRGAPLIGLSASLLLALLAESGKSRDELAVALETLRASRPTAVNLMNNLDRMKIALWQEDYIPALVAEALRLIDEDKRLCDAIASAGSALVKPGSRLLTHCNTGGLATAGVGTALGVIARAHQEGKVSNVWVDETRPLLQGGRLTAWELGELGVPYQLITDSMAASLMAKGQVDAVWVGADRIAANGDVANKIGTYSLAVLAKFHGIPFYVAAPQTTLDPDCPNGDAIPIEQRAASEVTGVAGSFGAVQWAPQEAQVYNPAFDVTPASLISGWVLDTGVVTPDEVAXGKFA

SEQ ID NO: 7305 - DNA, 753 bp, Enterobacter cloacae
  misc_feature (67)..(67): n is a, c, g or t
atggtttttgatttcaccggtaaaacggtctgggtgacgggcgcgggtaagggcattggttatgcgnccgcgctggcatttgtggaggccggggcgcaggtgaccgggttcgatctggctttccctcacggcgaatatccgtttgccaccgaaacgctggacgtggcggatgcggcgcaggcgagtgacgtctgcgggcgtttgctcagcagccttgagcggctcgatgtgctggttaacgcggcgggcattctgcgtatgggcgcgacggatcagctctcgcaggaggactggcagcagacctttgcggtcaacgtcggcggcgcgttcaacctgttccagcagacgatgggccagttccgtcatcagcaggggggggcgattgtgacggtggcctctgacgcggcgcacacgccgcgcatcggcatgagcgcctacggcgcgtcgaaagcggcgctgaaaagcctggcgctgaccgtcgggctggaactggcgggcagcggcgtacgctgtaacctggtgtcgccgggttcaacggataccgacatgcagcgcaccctgtggaccagcgatgatgcggaacagcggcgcattcgcggctttggcgagcagttcaagctcggcattccgctcggtaaaattgcccgtccacaggagattgctgcgaccgtgctgttcctggcatccgatgccgccagccatatcaccttgcaggatatcgtggtggacggcggctccacgctgggggcgtaa

SEQ ID NO: 7306 - protein, 250 aa, Enterobacter cloacae
  misc_feature (23)..(23): Xaa can be any naturally occurring amino acid
MVFDFTGKTVWVTGAGKGIGYAXALAFVEAGAQVTGFDLAFPHGEYPFATETLDVADAAQASDVCGRLLSSLERLDVLVNAAGILRMGATDQLSQEDWQQTFAVNVGGAFNLFQQTMGQFRHQQGGAIVTVASDAAHTPRIGMSAYGASKAALKSLALTVGLELAGSGVRCNLVSPGSTDTDMQRTLWTSDDAEQRRIRGFGEQFKLGIPLGKIARPQEIAATVLFLASDAASHITLQDIVVDGGSTLGA

SEQ ID NO: 7307 - DNA, 855 bp, Enterobacter cloacae
  misc_feature (196)..(196): n is a, c, g or t
atggccattccaaaattaaccgcatacgcgctgccaaccgccgccgaactgccgaccagtaaagtgaactgggcgtttgaaccggagcgcgccgcgctgctgatccacgatatgcaggagtacttcctgaacttctggggcgaaaatagcgacatgatgcagcaggtagtggcgaacatcgctaaactgcgcgcgnactgcaaagagcacaatattccggtgtactacaccgcgcagccgaaagatcagagcgatgaagaccgcgccctgctgaacgatatgtgggggccgggcctgactcgctcgccggagcagcagcgcatcgtcgctgagctgaccccggacgaagcggacaccgtgctggtgaagtggcgctacagcgcgtttcaccgctcgccgctggagcagatgcttaaagagaccgggcgcaaccagcttttgatcaccggcgtgtacgcccacatcggctgcatgaccaccgccaccgacgcctttatgcgcgacatcaaaccgttctttatcgccgacgcgctggcggatttcacccgcgacgagcacctgatgtcgctgaaatacgtggcaggacgttcgggccgcgtggtgatgaccgacgaactgctgccgtccgttccgacaacgaaagccgcgctgcgtgagctgatcctgccgctgctggacgagtccgacgagccgatggatgacgaaaacctgatcgactacggtctggattcagtgcgcatgatggcgctggccgcccgctggcgcaaagtgcacggcgacattgatttcgtgatgctggcaaaaaatccgaccctcgatgcctggtgggcgctgctctcccgcgaggtgaagtga

SEQ ID NO: 7308 - protein, 284 aa, Enterobacter cloacae
  misc_feature (66)..(66): Xaa can be any naturally occurring amino acid
MAIPKLTAYALPTAAELPTSKVNWAFEPERAALLIHDMQEYFLNFWGENSDMMQQVVANIAKLRAXCKEHNIPVYYTAQPKDQSDEDRALLNDMWGPGLTRSPEQQRIVAELTPDEADTVLVKWRYSAFHRSPLEQMLKETGRNQLLITGVYAHIGCMTTATDAFMRDIKPFFIADALADFTRDEHLMSLKYVAGRSGRVVMTDELLPSVPTTKAALRELILPLLDESDEPMDDENLIDYGLDSVRMMALAARWRKVHGDIDFVMLAKNPTLDAWWALLSREVK

SEQ ID NO: 7309 - DNA, 1176 bp, Enterobacter cloacae
  misc_feature (52)..(52): n is a, c, g or t
atggatacgtcattggctgaggaccttcagcacaccgcgaccacgctgcaancagacagctttttctttatgtcgccctatcgcagttttaccacgtcaggctgttttgcccgtttttctgaacccgccgtcggcggtgacgatccggcgggcccctttcagcagaaattagctcaggctttccagaatgcgaaaaacagcggcattgcccatccggtgatggtaggggcgatccccttcgatacccgcaaaccgtcatcgctgtttattccgcaacgctggcaaaccttctcccgcccggcgcgtcagcagtccgcacgctacgcctccggcgcgcagacgctgaacgtgcaacaacgcaccgagatcccgccgcagccggttttcgaggtgatggtcgctcgcgccgcgtcgctcaccgccacgccgcaggtgaataaggtggtactgtcgcgcctgattgatatcgccaccgacaaacagattgatagcagcgcgctgatggagcgtcttatcgcccagaacccggcgagctttaacttccacgtaccgctggaagacggcggcgtgctgctgggcgccagcccggaactgctgctgcgtaaagagggcgcgcactttagctcgctgccgctggcgggctctgcgcgccgtcagccggacgatgtgctggatcgcgaagcgggcactaagctgctggcctccgaaaaagaccgtcacgagcacgacctggtaacgcaggcgatgaaaaccattctggaaccgcgcagccatcatctgaccatgccggcttccccgcagctcatcaccaccccgacgctgtggcatctggcgacgccggtagaaggtgacgcgcgtgaaaacgagaacgccctgacgctggcctgtctgctgcacccgacgccagcgctgagcggcttcccgcatcaggcggcaaaagagctgattgccgagctggagccgttcgatcgtgagctgttcggcggcatcgtcggctggtgcgacagcgaagggaacggcgagtgggtggtaactatccgctgcgcgcgactgcatcaaaataccgttcgcctgtttgccggcgcgggcattgtgcctgcttcctctccggtaggcgagtggcgcgagacgggcgtgaagctctccaccatgctcaacgtgtttggtttgcactaa

SEQ ID NO: 7310 - protein, 391 aa, Enterobacter cloacae
  misc_feature (18)..(18): Xaa can be any naturally occurring amino acid
MDTSLAEDLQHTATTLQXDSFFFMSPYRSFTTSGCFARFSEPAVGGDDPAGPFQQKLAQAFQNAKNSGIAHPVMVGAIPFDTRKPSSLFIPQRWQTFSRPARQQSARYASGAQTLNVQQRTEIPPQPVFEVMVARAASLTATPQVNKVVLSRLIDIATDKQIDSSALMERLIAQNPASFNFHVPLEDGGVLLGASPELLLRKEGAHFSSLPLAGSARRQPDDVLDREAGTKLLASEKDRHEHDLVTQAMKTILEPRSHHLTMPASPQLITTPTLWHLATPVEGDARENENALTLACLLHPTPALSGFPHQAAKELIAELEPFDRELFGGIVGWCDSEGNGEWVVTIRCARLHQNTVRLFAGAGIVPASSPVGEWRETGVKLSTMLNVFGLH

SEQ ID NO: 7311 - DNA, 1005 bp, Enterobacter roggenkampii
  misc_feature (634)..(634): n is a, c, g or t
atgtcgttttcctcttccgcggtgcgcgccgtagccgtgcccgttttattgctgctgttgatccttgcgattgcactcagtttgctggttggcgcgaagccgctgcccgcgtccgttattgtcgatgcgctctccggtacctgccagagcgccgagtgcattatcgtgctcgacgcccgcctgccccgcacccttgccggcctgctggccggtggcgcgctcgggcttgccggtgccctgatgcaaaccctcacccgcaacccgctggcggaccctggcattctcggcgtgaactctggtgccagtttcgccattgtgctcggcgcggcgctgtttggtttcacctctccgtctgaacagctggtgatggccttctgcggcgcgctggccgcctcgctggtggtggcctttaccggcagccagggcggcggacagctcagcccggtacgtctgacactggcgggcgtggcgctcgcggcggtgctggaaggcttgtccaacggcatcgccctgctcaacccggacgtgtatgaccagctgcgcttctggcaggccggttcgctggatatccgtacccttgataccctgaaagtggtggcattcccggtgtttatctctgccgccgtagcgctgngtttaagccgggcgctcaacagcctgagcctcggcagcgacaccgcgaccgccctcggcaaccgcgtggcgcgcacgcagctgacgggcctgcttgtcatcaccgtgctgtgcggcagcgcgaccgccgtcgtcgggccgattgcctttatcggcctgatgatgccgcacatggcgcgctggctggtgggggcggatcaccgctggtcactaccggtcacgctgctggcgacccctgccctgctgctgtttgccgacgtactgggccgcctgctggtgccgggtgaattgcgcgtctcggtggtcagcgcctttatcggcgcgccggtgctgatcttcctggtacgacgcagacgcgggggtggcgcatga

SEQ ID NO: 7312 - protein, 334 aa, Enterobacter roggenkampii
  misc_feature (212)..(212): Xaa can be any naturally occurring amino acid
MSFSSSAVRAVAVPVLLLLLILAIALSLLVGAKPLPASVIVDALSGTCQSAECIIVLDARLPRTLAGLLAGGALGLAGALMQTLTRNPLADPGILGVNSGASFAIVLGAALFGFTSPSEQLVMAFCGALAASLVVAFTGSQGGGQLSPVRLTLAGVALAAVLEGLSNGIALLNPDVYDQLRFWQAGSLDIRTLDTLKVVAFPVFISAAVALXLSRALNSLSLGSDTATALGNRVARTQLTGLLVITVLCGSATAVVGPIAFIGLMMPHMARWLVGADHRWSLPVTLLATPALLLFADVLGRLLVPGELRVSVVSAFIGAPVLIFLVRRRRGGGA

SEQ ID NO: 7313 - DNA, 723 bp, Enterobacter cloacae
  misc_feature (95)..(95): n is a, c, g or t
gtggcgacactctttattgcggatctgcatctgcaaacagaagaaccggcgataaccgccggttttctgcgttttttacgcggtgaagcgaaaancgccgacgcgctgtacattctgggcgacctgtttgaggcctggattggcgacgacgatccgaacccgctgcaccgtgagatggcggcggccattaaagcactggtggattccggcgtcccctgctatttcattcacggcaaccgtgatttcctgatcggccagcgctacgcccgcgagagcggtatgacgctgctgccggaagagcaggtgctcaacctctatggccgcaatattctgatcatgcacggcgacacgctctgcactgacgataccggctacctggcgtttcgcgccaaagttcacaccccgtggatccagaaagtgttcctcgccctgccgctgtttatccgcaaccgcatcgccgccagaatgcgcgcgggcagcaaggccgccaacagcagcaaatcgatgaccatcatggacgtcaatccgcaggcggtggtgaaggtgatggagaagcatcgcgttcagtggctgatccacggccatacccatcgtcccgatgtacattcccttatcgccaacggcgagcccgcccatcgcgtggttttaggcgcctggcacagcgaaggatcgatggtcaaagtcacgccggaaggtgttgaactgatcgccttcccgttttaa

SEQ ID NO: 7314 - protein, 240 aa, Enterobacter cloacae
  misc_feature (32)..(32): Xaa can be any naturally occurring amino acid
MATLFIADLHLQTEEPAITAGFLRFLRGEAKXADALYILGDLFEAWIGDDDPNPLHREMAAAIKALVDSGVPCYFIHGNRDFLIGQRYARESGMTLLPEEQVLNLYGRNILIMHGDTLCTDDTGYLAFRAKVHTPWIQKVFLALPLFIRNRIAARMRAGSKAANSSKSMTIMDVNPQAVVKVMEKHRVQWLIHGHTHRPDVHSLIANGEPAHRVVLGAWHSEGSMVKVTPEGVELIAFPF

SEQ ID NO: 7315 - DNA, 2259 bp, Enterobacter cloacae
  misc_feature (239)..(239): n is a, c, g or t
atgagcgatatggcagagcgcctcgcgctacatgaattcacggaaaacgcctacctgaactactccatgtacgtcatcatggacagggcgttgccgtttatcggggatggcctgaagcccgttcagcgccgcatcgtctatgcgatgtccgaactggggctgaatgctaccgccaagtttaagaaatccgcccgtaccgtcggcgacgtgctgggtaaataccatccgcacggcgacancgcctgctatgaagcgatggtgctgatggcccagccgttctcttatcgctatccgctggtggatggccaagggaactggggggcaccggacgatccgaaatccttcgcggcaatgcgttataccgaatcccgcctgtctaaatatgccgaagtgctgttgggcgagctggggcaggggacggtcgactgggtgccaaacttcgacggtacgatgcaggagccgaagatgctgcctgcgcgtctgccgaacatcctgctgaacggcacgaccggtatcgccgtgggcatggcgacggacattccgccgcacaacctgcgtgaagtggcaaaagccgccatcaccctgattgagcagccgaaaacctctctggacgatctgctggatatcgtgcaggggccggactacccgaccgaagccgagatcatcacctcgcgcgcggaaatccgcaaaatctaccagaacggtcgcggctccgtgcgcatgcgcgcggtgtggaccaaagaagacggggccgtggtgatcaccgcgctgccgcaccaggtgtccggtgcgaaggtgctggagcagatcgcctcccagatgcgcaataaaaagctgccgatggtggacgacctgcgcgacgaatcggaccacgaaaacccgacccgtctggtgatcgtgccgcgctctaaccgcgtggacatggagcaggtgatgaaccacctgttcgccactaccgatctggaaaaaagctaccgcatcaacctgaacatgattggtctggacggtcgtccggcggtgaaaaacctgctggagatcctcacagaatggctggccttccgccgcgatacggtgcgccgtcgtctgaaccatcgtctggaaaaagtgcttaagcgcctgcatatcctcgaaggtttgctggtggcgttcctcaacattgacgaagtgatcgagatcattcgtaccgaggacgaacctaagcctgccctgatgtcgcgctttggcatcagcgaaacccaggccgaagcgatcctcgaactgaaattgcgccatctcgccagactggaagagatgaagatccgcggcgagcagaacgagctggaaaaagagcgcgatcagcttcaggcgattctggcatccgagcgcaagatgaacaccctgctgaagaaagagttgcaggccgatgccgacgcctttggcgacgaccgtcgttctccgctgcacgagcgcgaagaggcgaaggcgatgaacgagcacgacatgctgccttccgagccggtgaccatcgtgctttcccagagcggctgggtacgtagcgctaaaggccacgatatcgacgcgccgggtctgagctacaaatctggtgacagcttcaaggcggcggtgaagggcaagagtaaccagccggtggcgttcatcgactccacgggccgcagctacgccatcgacccgatcacgctgccgtctgcgcgcggccagggcgaaccgctaactggcaagctgacgctgccgccgggcgccacggtggaccatatgctgatggaggccgacgatcaaaaactgctgatggcgtctgatgcgggctacggctttatctgtaccttcaacgatctggtgtcgcgtaaccgtgctggtaaggcgctgattagcctgccggataacgcacacgtcatgccgccgctgatcatcgagaacgaaagcgacatgctgctggcgatcaccgctgccggacgcatgctgatgttcccggtcagcgatctgccggagctgtcgaaagggaagggcaacaagatcatcagtatcccgtcagcggaagcggcaaaaggcgtcgatggcctcgcgcatctcttcctgctgccgccgcagagcaccctgaccattcatgtcggcaagcgtaaaatcaaactgcgtccggaagagttgcagaaggtggtgggtgagcgtggacgtcgcggctcactgatgcgcggcctccagcgaattgaccgcgtggagatcgactcgccggcgcgcagcaaagcggacgacagcgaagagtaa

SEQ ID NO: 7316 - protein, 752 aa, Enterobacter cloacae
  misc_feature (80)..(80): Xaa can be any naturally occurring amino acid
MSDMAERLALHEFTENAYLNYSMYVIMDRALPFIGDGLKPVQRRIVYAMSELGLNATAKFKKSARTVGDVLGKYHPHGDXACYEAMVLMAQPFSYRYPLVDGQGNWGAPDDPKSFAAMRYTESRLSKYAEVLLGELGQGTVDWVPNFDGTMQEPKMLPARLPNILLNGTTGIAVGMATDIPPHNLREVAKAAITLIEQPKTSLDDLLDIVQGPDYPTEAEIITSRAEIRKIYQNGRGSVRMRAVWTKEDGAVVITALPHQVSGAKVLEQIASQMRNKKLPMVDDLRDESDHENPTRLVIVPRSNRVDMEQVMNHLFATTDLEKSYRINLNMIGLDGRPAVKNLLEILTEWLAFRRDTVRRRLNHRLEKVLKRLHILEGLLVAFLNIDEVIEIIRTEDEPKPALMSRFGISETQAEAILELKLRHLARLEEMKIRGEQNELEKERDQLQAILASERKMNTLLKKELQADADAFGDDRRSPLHEREEAKAMNEHDMLPSEPVTIVLSQSGWVRSAKGHDIDAPGLSYKSGDSFKAAVKGKSNQPVAFIDSTGRSYAIDPITLPSARGQGEPLTGKLTLPPGATVDHMLMEADDQKLLMASDAGYGFICTFNDLVSRNRAGKALISLPDNAHVMPPLIIENESDMLLAITAAGRMLMFPVSDLPELSKGKGNKIISIPSAEAAKGVDGLAHLFLLPPQSTLTIHVGKRKIKLRPEELQKVVGERGRRGSLMRGLQRIDRVEIDSPARSKADDSEE

SEQ ID NO: 7317 - DNA, 1299 bp, Escherichia coli
  misc_feature (547)..(547): n is a, c, g or t
atgcgtaaaattaaagggttacgttggtacatgatcgcactggtgacgctcggcaccgtgctgggctacctgacacgtaacaccgtggcagcagcggcgccaacgttgatggaagagttacatatctccacgcagcaatactcttacatcattgcggcttactctgccgcttacaccgtaatgcagcctgttgcaggttatgttcttgatattctgggtacaaaaattggttatgccttcttcgctgtagcctgggccgtcttctgtggggcgaccgcgctggccggcagttggggcggactggcgctggcgcgtggtgcggtaggtgctgccgaagcagcgatgatccccgcgggtctgaaagccagctctgaatggttcccggcaaaagagcgttcaatcgctgtcggttacttcaacgtgggctcctccatcggggcgatgattgctccgccactggtggtgtgggcgattgtgatgcacagctggcagatggcgttcatcatctccggtgtgctgagctttgcctgggccatggcgtggctgntcttctataaacacccacgcgatcagaaaaagctgtctgacgaagaacgtgactacattatcaatggtcaggaatctcagcatcagaccgacaacggcaaaaagatgtccgtctggcagatcctgggcacccgtcagttctggggtatcgccctgccacgcttcctggcagaaccggcctggggtacgtttaacgcctggatcccgctgttcatgtttaaagtttacggctttaacctgaaagagatcgcgatgttcgcctggatgccaatgctgtttgcagacctgggctgtatcgtcggcggctacctgccaccgctgttccagcgctggtttggcgtgaacctgattgtgtcccgtaagatggtggtcaccatgggcgccctgctgatgatcggcccgggcatgatcggcctgttcaccagcccttacgtggctatcgccctgctgtgtatcgggggctttgctcaccagtctctgtccggtgcgctgattacgctctcgtccgacgtgtttggtcgtaacgaagtcgctaccgccaacggcctgaccgggatggccgcctggaccgcaagtaccctgtttgcgctggtggtcggcgcgctggcagatacgattggtttcagcccgctgttcgcggtactggctatcttcgacctgatgggtgcggtggttatctggacggtgctgaagagcaaatccgccgatgaactggcgaaagagtcccttgggggaccggcgacgcagagttag

SEQ ID NO: 7318 - protein, 432 aa, Escherichia coli
  misc_feature (183)..(183): Xaa can be any naturally occurring amino acid
MRKIKGLRWYMIALVTLGTVLGYLTRNTVAAAAPTLMEELHISTQQYSYIIAAYSAAYTVMQPVAGYVLDILGTKIGYAFFAVAWAVFCGATALAGSWGGLALARGAVGAAEAAMIPAGLKASSEWFPAKERSIAVGYFNVGSSIGAMIAPPLVVWAIVMHSWQMAFIISGVLSFAWAMAWLXFYKHPRDQKKLSDEERDYIINGQESQHQTDNGKKMSVWQILGTRQFWGIALPRFLAEPAWGTFNAWIPLFMFKVYGFNLKEIAMFAWMPMLFADLGCIVGGYLPPLFQRWFGVNLIVSRKMVVTMGALLMIGPGMIGLFTSPYVAIALLCIGGFAHQSLSGALITLSSDVFGRNEVATANGLTGMAAWTASTLFALVVGALADTIGFSPLFAVLAIFDLMGAVVIWTVLKSKSADELAKESLGGPATQS

SEQ ID NO: 7319 - DNA, 771 bp, Enterobacter cloacae
  misc_feature (397)..(397): n is a, c, g or t
atgagtaacgacatcttcccgaataaatttaaagcggccctcgcggcgcaccagattcagattggctgctggtctgcgctggccaaccccatcagcaccgaagtgctgggcctggccgggttcgactggctggtgctggacggcgaacatgcgccaaacgatatcaacacgtttattccgcagctgatggcgctgaaaggcagccacagcgcgccggtggtgcgtgtgcccaccaacgagccggtgatcatcaagcgtctgctggatatcggcttctacaacttcctgatcccgtttgttgaaacggaagaagaagcggtgctggccgtggcggcgacccgctatccaccggaagggatccgcggcgtgtccgtctcgcaccgcgccaacatgtttngcaccgtgccggactatttcgcccagtccaacaagaacatcaccattctggttcagatcgagagccagcagggggtcgataacgtcgacgctattgccgcgacggagggggtagacggcattttcgtcggcccgagcgatctggcggccgcctttggtcatctgggcaacgccagccatccggacgtgcagcgcgcaattcagcacatttttgcccgtgccaaagcgcacggtaaaccgtgcggcattctggcgccagtggaagccgatgcccgccgctacctggagtggggcgcaacgtttgtcgccgtgggcagcgatctcggcgtattccgcgccgccacgcagaaattagcggacgcttttaaaaaataa

SEQ ID NO: 7320 - protein, 256 aa, Enterobacter cloacae
  misc_feature (133)..(133): Xaa can be any naturally occurring amino acid
MSNDIFPNKFKAALAAHQIQIGCWSALANPISTEVLGLAGFDWLVLDGEHAPNDINTFIPQLMALKGSHSAPVVRVPTNEPVIIKRLLDIGFYNFLIPFVETEEEAVLAVAATRYPPEGIRGVSVSHRANMFXTVPDYFAQSNKNITILVQIESQQGVDNVDAIAATEGVDGIFVGPSDLAAAFGHLGNASHPDVQRAIQHIFARAKAHGKPCGILAPVEADARRYLEWGATFVAVGSDLGVFRAATQKLADAFKK

SEQ ID NO: 7321 - DNA, 1434 bp, Citrobacter koseri
  misc_feature (1085)..(1085): n is a, c, g or t
atgcgattttccagttttatcatcggattgactaccagtataacgttcaccgttcaggccgcgaatgttgatgagtacattaatcaactgcccgccggcgcgaaccttgccctgatggtgcagaaggttggcgcgcaggctcccgagattgactatcacagtcaacagatggcgctgcctgccagtacccagaaggtgatcactgccctcgccgccctgctccagctcgggcctgacttccgttttactaccacccttgaaaccagaggtaacgttgagggtggcgaactgaaaggcgatcttatcgcccgttttggtggcgatcccacctttaagcgccaggatgtccgcaatatggtggcggtactgaaaaaatccggcgtaacaaaaattgatggcaacgtgctgatcgacacctccattttcgccagccacgataaagcgcctggctggccgtggaacgacatgacgcagtgctttagcgccccgccagccgccgccatcgttgaccgtaactgcttctccgtatcgctttacagcgcgccaaaaccaaatgacttagcttttatccgcgtggcctcatactacccggtcacgatgttcagccaggtgcggacgctggcgaaaggctccccggaggcgcagtattgcgagctggacgtggtaccgggcgatctcaatcgctatacgctcaccggctgcctgacccagcggtccgatcccctcccgctggccttcgccattcaggatggcgcgggctatgccggtgccatttttaaagatgaactgaagcaggcgggcataacctacaccggaacgctgctgcgccagacgcaggtgaatgagccaggcacggtgatcgccagcaaacagtccgcgccactgcatgatttgcttaagattatgctgaaaaagtcggataacatgattgccgacacggtgttccgcatgattgggcacgcgcgatttggtgtgccgggcacctggcgggccggttctgatgccgtacgtcagatcctgcgccagcaggcgggtatcgatctgggcaatacgatcgccgttgatggttccggtttatcgcgtcntaacctgatctcgccggccaccatgatgcaggtgttgcagtacattgctcagcatgacgctgagctaaactttattacgatgctgccgcttgccggacacgacggctctcttcagtaccgcgcgggccttcacgctgcgggcgtggatggcaaagtgtcagccaaaacgggttccctgcaaggcgtttacaaccttgccggttttatcactaccgccagcggacaacgcatggcatttgtgcagtatctttccggctatgccgtcgaaccggctgaccagcgcaatcgccgtattccactggtgcgtttcgaaagcaggctctataaggacatctaccagaataactag

SEQ ID NO: 7322 - protein, 477 aa, Citrobacter koseri
  misc_feature (362)..(362): Xaa can be any naturally occurring amino acid
MRFSSFIIGLTTSITFTVQAANVDEYINQLPAGANLALMVQKVGAQAPEIDYHSQQMALPASTQKVITALAALLQLGPDFRFTTTLETRGNVEGGELKGDLIARFGGDPTFKRQDVRNMVAVLKKSGVTKIDGNVLIDTSIFASHDKAPGWPWNDMTQCFSAPPAAAIVDRNCFSVSLYSAPKPNDLAFIRVASYYPVTMFSQVRTLAKGSPEAQYCELDVVPGDLNRYTLTGCLTQRSDPLPLAFAIQDGAGYAGAIFKDELKQAGITYTGTLLRQTQVNEPGTVIASKQSAPLHDLLKIMLKKSDNMIADTVFRMIGHARFGVPGTWRAGSDAVRQILRQQAGIDLGNTIAVDGSGLSRXNLISPATMMQVLQYIAQHDAELNFITMLPLAGHDGSLQYRAGLHAAGVDGKVSAKTGSLQGVYNLAGFITTASGQRMAFVQYLSGYAVEPADQRNRRIPLVRFESRLYKDIYQNN

SEQ ID NO: 7323 - DNA, 1125 bp, Enterobacter cloacae
  misc_feature (827)..(827): n is a, c, g or t
atgcaaaacctgtccccttcatcgcgttaccaactggccctgagcgagggcacacaccagccggatgatgtccagcgtgaagcggttaaccgcctggacacgatttatcaggaacttctggcgaaacccgccgatgcggtgcagagcagtgggctgaaggcggcattcggccgtttactgggcaaaaaagagcccacggtaaacgcaccggttcgtggcttatatatgtggggcggcgttgggcggggtaagacctggctgatggacatgttctaccagagcctgcccggcacgcgtaagcagcgcctgcactttcaccgttttatgctgcgggtccatgaagagctgacggcgctccagggcgaaaccgacccgctggacattgtggccgatcgctttaaggcggaaacggacgtgctctgcttcgacgagttctttgtttccgatattacggatgccatgctgttggggggcctcatgaaagcgctgtttgcgcgtgggatcactctggtggcgacctccaatatcccgccggatgagctttatcgcaatggtctccagcgggcgcgtttcctgccggccattgatgctatcaaacagcactgcgacatcatgaacgtcgatgccggcgtcgattatcgactgcgcacattaacgcaggcacacctgtggctttcgccgttgaacgccgacacagcccgcgagatggataaactgtggctggcgctggcgggagcgccgcgggataacgcgccagcgctggagattaatcatcgtccgttgccgacgcttggcgtagaaaaccagacgctggccgtctcgtttgnaacgctctgcgtggacgcccgcagccagcatgactacattgcgctttcgcgtctgttccataccgttatgttgtgggatgtgcccgttatgaccccactcatggagagcgaagcgcgccgcttcatcgcgctggtagatgagttttacgagcgccacgttaagctggtggtcagcgccgaggtgcctttatatgaggtttatcagggcgagcgcctgaagtttgagttccagcgctgcctgtcgcgcctgcaagagatgcagagcgaagagtacctcaagcgtgagcatatgccataa

SEQ ID NO: 7324 - protein, 374 aa, Enterobacter cloacae
  misc_feature (276)..(276): Xaa can be any naturally occurring amino acid
MQNLSPSSRYQLALSEGTHQPDDVQREAVNRLDTIYQELLAKPADAVQSSGLKAAFGRLLGKKEPTVNAPVRGLYMWGGVGRGKTWLMDMFYQSLPGTRKQRLHFHRFMLRVHEELTALQGETDPLDIVADRFKAETDVLCFDEFFVSDITDAMLLGGLMKALFARGITLVATSNIPPDELYRNGLQRARFLPAIDAIKQHCDIMNVDAGVDYRLRTLTQAHLWLSPLNADTAREMDKLWLALAGAPRDNAPALEINHRPLPTLGVENQTLAVSFXTLCVDARSQHDYIALSRLFHTVMLWDVPVMTPLMESEARRFIALVDEFYERHVKLVVSAEVPLYEVYQGERLKFEFQRCLSRLQEMQSEEYLKREHMP

SEQ ID NO: 7325 - DNA, 975 bp, Enterobacter cloacae
  misc_feature (40)..(40): n is a, c, g or t
atgcaggctttgatcttagaacagcaggacggcaaaaccnttgcctcagtgcaagccatcgaggagagccgcctgccggagggcgacgtgaccgtagatatcgactggtccagcctgaactataaggatgcgctggccattacgggaaaaggtaaaatcatccgaaatttcccgatggtgccaggaatcgactttgcaggccgcgtacataccagtgaagatccacgttttcacgccggacagcaggtgctgctcaccggctggggcgtaggtgaaaaccactggggcggactggcagcgcaggcgcgcgtaaaaggtgactggctggtcccgatgccgaaaggcctggacggtcgtaaggcgatgatcatcggcacggcaggtttcaccgccatgctgtgcgtgatggcgctggaagaggccgggatccgccctgactctggcgaaattgtcgtcaccggcgccagcggcggcgtgggcagcacggccgtcacgctgctgcacaagttggggtatcaggtcgctgccgtctcaggccgcgaaagtacgcatgattatctacgtcaattgggcgcaagccgcattctgagccgcgacgaatttgccgagacccgcccgctggaaaaacaggtctgggctggcgcagtagataccgtcggcgacaaagtgctggcgaaggtgctggcgcaaatgaattacggcggctgcgtggcggcctgtggactggcgggtggttttgccctgccgacgacggtgatgccatttattctgcgtaacgtgcgtcttcagggtgtcgattcggtcatgaccccagccgagcggcgggctgaggcctgggaacgtctggtgcaggatctgccagcctcattctttgaccagagcgccactgagattaccctgagccaggcgccagagttcgccaataaaatcatggacaaccagttccacggtcgtgcgcttgttaaaatcgcctaa

SEQ ID NO: 7326 - protein, 324 aa, Enterobacter cloacae
  misc_feature (14)..(14): Xaa can be any naturally occurring amino acid
MQALILEQQDGKTXASVQAIEESRLPEGDVTVDIDWSSLNYKDALAITGKGKIIRNFPMVPGIDFAGRVHTSEDPRFHAGQQVLLTGWGVGENHWGGLAAQARVKGDWLVPMPKGLDGRKAMIIGTAGFTAMLCVMALEEAGIRPDSGEIVVTGASGGVGSTAVTLLHKLGYQVAAVSGRESTHDYLRQLGASRILSRDEFAETRPLEKQVWAGAVDTVGDKVLAKVLAQMNYGGCVAACGLAGGFALPTTVMPFILRNVRLQGVDSVMTPAERRAEAWERLVQDLPASFFDQSATEITLSQAPEFANKIMDNQFHGRALVKIA

SEQ ID NO: 7327 - DNA, 1140 bp, Enterobacter cloacae
  misc_feature (707)..(707): n is a, c, g or t
atgacgaatcacttcagatgcttacccttatccggtttcattgtctgtgccgcgctgctcaccgggtgcgatgggcaagaaaacccacagcagcatgcgcaagctcctcaggtcagtgttcatattgttaaaagcgcgccactggccgtaacgacagaattgcccggcagaactgacgcgtatcgtgttgcggaggttcgtcctcaggtaagtggtatcattctgcaccgtaattttaccgaaggcagcgacgttaaagcgggtgaatccctttatcaaatcgatccggccacctatcaggcagcctacgacaatgcgaaaggtgaactggtaaaagcacaggcggcggcgaatatcgcccatctgacggtgaaacgttacgttccgctggttggtacgcaatatgtgagcaagcaggagtacgatcaggcggtggcaactgcccagcaggcggatgcgagcgtggttgccgcgaaggctggcgttgaaagcgcgcggatcaacctggcctatacgaaagtcacatccccaatcaacgggcgtataggtaaatccagcgtcaccgaaggggcgttagtcactaatggccaggcaactgcactggcgacggttcagcaactcgatcccatttatgtcgatgtgacgcaatccagcagcgattttatgcgcctgaagcagcagacgagcctgcaaaagggagacaccancagcgtcgagttgctgatggaaaatggccagccttatccgctgaaagggacgctccagttctctgatgtcacggtagatgaaagtaccggctcaatcacccttcgcgccctcttccctaacccacagcatatgctgttaccgggtatgtttgtccgtgcgcgcatcgatgaaggtacgcaacctgatgccattctggttcctcagcagggggtaacccgtacaccacgcggagatgccaccgtgcttgtggtaaatgagaaaaaccaggtggaatcacgcactgtcgttgcaccgcaggcgattggcgatcgctggctgatcacggaaggcctcaaaaacggcgaccgcgtcattatcagcggcctgcaaaaagttcgccctggcgtcaccgtcgtggctattcctgataccgcagcgactccagccagttaa

SEQ ID NO: 7328 - protein, 379 aa, Enterobacter cloacae
  misc_feature (236)..(236): Xaa can be any naturally occurring amino acid
MTNHFRCLPLSGFIVCAALLTGCDGQENPQQHAQAPQVSVHIVKSAPLAVTTELPGRTDAYRVAEVRPQVSGIILHRNFTEGSDVKAGESLYQIDPATYQAAYDNAKGELVKAQAAANIAHLTVKRYVPLVGTQYVSKQEYDQAVATAQQADASVVAAKAGVESARINLAYTKVTSPINGRIGKSSVTEGALVTNGQATALATVQQLDPIYVDVTQSSSDFMRLKQQTSLQKGDTXSVELLMENGQPYPLKGTLQFSDVTVDESTGSITLRALFPNPQHMLLPGMFVRARIDEGTQPDAILVPQQGVTRTPRGDATVLVVNEKNQVESRTVVAPQAIGDRWLITEGLKNGDRVIISGLQKVRPGVTVVAIPDTAATPAS

SEQ ID NO: 7329 - DNA, 2034 bp, Citrobacter braakii
  misc_feature (1279)..(1279): n is a, c, g or t
atgactcaagtcgcgaaaaaaattctggtaacgtgcgccctgccgtacgccaacggctcaatccacctcggccacatgctggagcatatccaggctgatgtctgggtccgttaccagcgaatgcgcggccacgaggtgaacttcatctgtgcggacgatgcccacggcacgccgatcatgctgaaagcgcagcagctgggcatttccccggaacagatgatcgccgaaatgagtcaggagcatcagaccgattttgctggctttgacatcagctatgacaactatcactccacgcacagcgacgaaaaccgcgagctgtcagagctgatctactcccgtctgaaagagaacggtttcattaaaaaccgcaccatctctcagctgtacgatccggaaaaaggcatgttcctgccggaccgtttcgtcaaaggcacctgtccgaaatgtaaatccccggaccagtacggcgataactgcgaagtgtgcggcgcaacctacagcccgaccgagcttatcgaaccgaagtccgtggtctccggcgcgacgccggtgatgcgtgactccgagcacttcttcttcgacctgccgtcgttcagcgaaatgctgaaggcgtggacccgcagcggtgcgttgcaggagcaggtcgcgaacaaaatgcaggagtggttcgaatccgggctgcaacagtgggatatctcccgcgatgcgccctactttggcttcgaaatcccgaacgcgccgggcaaatatttttacgtctggcttgatgcgccgattggctacatggggtcgttcaagaatctgtgtgacaagcgcggcgacaccgtaagcttcgacgaatactggaagaaagattccgatgccgagctgtatcacttcatcggtaaagacatcgtttacttccacagcctgttctggccagcaatgctggaaggcagcaacttccgcaagccgaccaacctgttcgtacatggctacgtaacggtgaacggcgcgaagatgtctaaatctcgcgggacgtttattaaggccagcacctggctgaaccactttgacgcggacagcctgcgctactactacaccgcgaagctctcttcccgcatcgacgatatcgacctgaatctggaagatttcgtgcagcgcgtgaacgcggacatcgtcaacaaggtggtgaacctggcgtcccgtaacgcaggttttatcgccaaacgctttgacggcgtgctttctgccgaactggccgatcctgagctgtataaaaccttcaccgacgccgccnctgcggttggcgaagcctgggaaagccgtgaattcggtaaagccattcgcgaaatcatggcgctggcagacgtggccaaccgctatgtcgacgagcaggcgccgtgggtggtggcgaaacaggaaggccgcgacgccgacttgcaggcgatctgcaccatgggtctgaacatgttccgcgtgctgatgacctggctgaagccggttctgccgcagctggcagcccgcgcggaagcattcctgaacaccgaactgacctgggatgccatccagcagccgctgctcggccacaaggtgaacaccttcaaggcgctgtataaccgcatcgagatgaagcaggttgacgcgctggtggaagcatccaaagaagaggtgaaagcggctgccgcaccggtgaccggcccgctggcggacgatccgattcaggaaaccatcacctttgatgatttcgccaaagtcgacctgcgcgtggcgctgatcgaaaacgcggagttcgtggaaggttctgacaaactgctgcgtctgaccctggatctgggcggcgagaagcgtaacgtcttctccggcattcgttccgcgtatcctgatccgcaggtgctgattggtcgtcagaccgtgatggtggcaaacctggcgccgcgcaaaatgcgcttcggcatctctgaggggatggtgatggccgcaggcccgggcgggaaagatatcttcctgttaagccctgacgaaggcgcgaagccgggtcagcaggtgaaataa

SEQ ID NO: 7330 - protein, 677 aa, Citrobacter braakii
  misc_feature (427)..(427): Xaa can be any naturally occurring amino acid
MTQVAKKILVTCALPYANGSIHLGHMLEHIQADVWVRYQRMRGHEVNFICADDAHGTPIMLKAQQLGISPEQMIAEMSQEHQTDFAGFDISYDNYHSTHSDENRELSELIYSRLKENGFIKNRTISQLYDPEKGMFLPDRFVKGTCPKCKSPDQYGDNCEVCGATYSPTELIEPKSVVSGATPVMRDSEHFFFDLPSFSEMLKAWTRSGALQEQVANKMQEWFESGLQQWDISRDAPYFGFEIPNAPGKYFYVWLDAPIGYMGSFKNLCDKRGDTVSFDEYWKKDSDAELYHFIGKDIVYFHSLFWPAMLEGSNFRKPTNLFVHGYVTVNGAKMSKSRGTFIKASTWLNHFDADSLRYYYTAKLSSRIDDIDLNLEDFVQRVNADIVNKVVNLASRNAGFIAKRFDGVLSAELADPELYKTFTDAAXAVGEAWESREFGKAIREIMALADVANRYVDEQAPWVVAKQEGRDADLQAICTMGLNMFRVLMTWLKPVLPQLAARAEAFLNTELTWDAIQQPLLGHKVNTFKALYNRIEMKQVDALVEASKEEVKAAAAPVTGPLADDPIQETITFDDFAKVDLRVALIENAEFVEGSDKLLRLTLDLGGEKRNVFSGIRSAYPDPQVLIGRQTVMVANLAPRKMRFGISEGMVMAAGPGGKDIFLLSPDEGAKPGQQVK

SEQ ID NO: 7331 - DNA, 2034 bp, Enterobacter cloacae complex
  misc_feature (1429)..(1429): n is a, c, g or t
atgactcaagtcgcgaaaaaaattctggtaacgtgcgccctgccgtacgccaacggctcaatccacctcggccacatgctggagcatatccaggctgatgtctgggtccgttaccagcgaatgcgcggccacgaggtgaacttcatctgtgcggacgatgcccacggcacgccgatcatgctgaaagcgcagcagctgggcatttccccggaacagatgatcgccgaaatgagtcaggagcatcagaccgattttgctggctttgacatcagctatgacaactatcactccacgcacagcgacgaaaaccgcgagctgtcagagctgatctactcccgtctgaaagagaacggtttcattaaaaaccgcaccatctctcagctgtacgatccggaaaaaggcatgttcctgccggaccgtttcgtcaaaggcacctgtccgaaatgtaaatccccggaccagtacggcgataactgcgaagtgtgcggcgcaacctacagcccgaccgagcttatcgaaccgaagtccgtggtctccggcgcgacgccggtgatgcgtgactccgagcacttcttcttcgacctgccgtcgttcagcgaaatgctgaaggcgtggacccgcagcggtgcgttgcaggagcaggtcgcgaacaaaatgcaggagtggttcgaatccgggctgcaacagtgggatatctcccgcgatgcgccctactttggcttcgaaatcccgaacgcgccgggcaaatatttttacgtctggcttgatgcgccgattggctacatggggtcgttcaagaatctgtgtgacaagcgcggcgacaccgtaagcttcgacgaatactggaagaaagattccgatgccgagctgtatcacttcatcggtaaagacatcgtttacttccacagcctgttctggccagcaatgctggaaggcagcaacttccgcaagccgaccaacctgttcgtacatggctacgtaacggtgaacggcgcgaagatgtctaaatctcgcgggacgtttattaaggccagcacctggctgaaccactttgacgcggacagcctgcgctactactacaccgcgaagctctcttcccgcatcgacgatatcgacctgaatctggaagatttcgtgcagcgcgtgaacgcggacatcgtcaacaaggtggtgaacctggcgtcccgtaacgcaggttttatcgccaaacgctttgacggcgtgctttctgccgaactggccgatcctgagctgtataaaaccttcaccgacgccgccgctgcggttggcgaagcctgggaaagccgtgaattcggtaaagccattcgcgaaatcatggcgctggcagacgtggccaaccgctatgtcgacgagcaggcgccgtgggtggtggcgaaacaggaaggccgcgacgccgacttgcaggcgntctgcaccatgggtctgaacatgttccgcgtgctgatgacctggctgaagccggttctgccgcagctggcagcccgcgcggaagcattcctgaacaccgaactgacctgggatgccatccagcagccgctgctcggccacaaggtgaacaccttcaaggcgctgtataaccgcatcgagatgaagcaggttgacgcgctggtggaagcatccaaagaagaggtgaaagcggctgccgcaccggtgaccggcccgctggcggacgatccgattcaggaaaccatcacctttgatgatttcgccaaagtcgacctgcgcgtggcgctgatcgaaaacgcggagttcgtggaaggttctgacaaactgctgcgtctgaccctggatctgggcggcgagaagcgtaacgtcttctccggcattcgttccgcgtatcctgatccgcaggtgctgattggtcgtcagaccgtgatggtggcaaacctggcgccgcgcaaaatgcgcttcggcatctctgaggggatggtgatggccgcaggcccgggcgggaaagatatcttcctgttaagccctgacgaaggcgcgaagccgggtcagcaggtgaaataa

SEQ ID NO: 7332 - protein, 677 aa, Enterobacter cloacae complex
  misc_feature (477)..(477): Xaa can be any naturally occurring amino acid
MTQVAKKILVTCALPYANGSIHLGHMLEHIQADVWVRYQRMRGHEVNFICADDAHGTPIMLKAQQLGISPEQMIAEMSQEHQTDFAGFDISYDNYHSTHSDENRELSELIYSRLKENGFIKNRTISQLYDPEKGMFLPDRFVKGTCPKCKSPDQYGDNCEVCGATYSPTELIEPKSVVSGATPVMRDSEHFFFDLPSFSEMLKAWTRSGALQEQVANKMQEWFESGLQQWDISRDAPYFGFEIPNAPGKYFYVWLDAPIGYMGSFKNLCDKRGDTVSFDEYWKKDSDAELYHFIGKDIVYFHSLFWPAMLEGSNFRKPTNLFVHGYVTVNGAKMSKSRGTFIKASTWLNHFDADSLRYYYTAKLSSRIDDIDLNLEDFVQRVNADIVNKVVNLASRNAGFIAKRFDGVLSAELADPELYKTFTDAAAAVGEAWESREFGKAIREIMALADVANRYVDEQAPWVVAKQEGRDADLQAXCTMGLNMFRVLMTWLKPVLPQLAARAEAFLNTELTWDAIQQPLLGHKVNTFKALYNRIEMKQVDALVEASKEEVKAAAAPVTGPLADDPIQETITFDDFAKVDLRVALIENAEFVEGSDKLLRLTLDLGGEKRNVFSGIRSAYPDPQVLIGRQTVMVANLAPRKMRFGISEGMVMAAGPGGKDIFLLSPDEGAKPGQQVK

SEQ ID NO: 7333 - DNA, 885 bp, Enterobacter cloacae
  misc_feature (472)..(472): n is a, c, g or t
atgcatccacgttttcaagctgctttctctcagcttgcagagaatttgcaatcagccctggctccggttctggcggatgcgcatttccccgccctgctgacggcagatcaggtcacggcccttaaacaggcaacggggctggacgaagacgcgctggctttcgccctgctgccccttgcggctgcctgcgcccgcgctgacctttcccattttaacgtaggcgcaattgcgcgcggcgtgagcggaacttggtacttcggcggaaacatggagtttcttggtgcgaccatgcagcaaaccgtccacgcggagcagagcgccatcagtcacgcctggctgcgcggcgaaaaagccctgcgcgccatcaccgtcaactataccccttgcggccactgccgccagtttatgaatgagctgaacagcggtcttgaactgcgtatcaacctgccgggacgcgcaccgcatacgctgngtgattacctgccggatgctttcggcccgaaagatcttgagatcaaaaccctgctgatggacgagcaggaccacggttatgcgctctcgggagatgagctgagcgaagcggccattgccgccgccaataaaagccacacgccatacagcaaatctccaagcggcgtcgcccttcagtgccgcgacggccgcatcttcaccggcagctatgcagagaacgccgcatttaacccgacgctgcctccgctccagggtgccctgaacctgcttagcctgaacgggtatgactacccggatattcagcgcgcaatcctggctgaaaaggccgatgcgccgctgatccagtgggacgcgaccgcagccacgctgaaagcgctgggctgttcaaccatcgaccgcgtgctgctggcataa

SEQ ID NO: 7334 - protein, 294 aa, Enterobacter cloacae
  misc_feature (158)..(158): Xaa can be any naturally occurring amino acid
MHPRFQAAFSQLAENLQSALAPVLADAHFPALLTADQVTALKQATGLDEDALAFALLPLAAACARADLSHFNVGAIARGVSGTWYFGGNMEFLGATMQQTVHAEQSAISHAWLRGEKALRAITVNYTPCGHCRQFMNELNSGLELRINLPGRAPHTLXDYLPDAFGPKDLEIKTLLMDEQDHGYALSGDELSEAAIAAANKSHTPYSKSPSGVALQCRDGRIFTGSYAENAAFNPTLPPLQGALNLLSLNGYDYPDIQRAILAEKADAPLIQWDATAATLKALGCSTIDRVLLA

SEQ ID NO: 7335 - DNA, 1233 bp, Klebsiella oxytoca
  misc_feature (919)..(919): n is a, c, g or t
atgacaggcggcgtaaactccgcctctctctgttactcgcaaagactgaacatgcataacacccccgctgccgcctcaccaaagccttttgatttgacgtcaacggcgtttttgatcgttgctttcctcaccggtattgccggtgcgttacaaacgcctacgctgagcctgtttctgaccaacgaagtccacgcccgcccggcgatggttggcttcttcttcaccgggagcgccatcatcggcattttcgtcagccagtttcttgccgggcgttcagaccgcaaaggcgatcgcaaaagcctgatcgttttttgctgcctgctcggggtgtttgcctgcctgctgtttgcctggaaccgtaactacttcattctgctgttcgtgggcgtcttcctgagcagtttcggctcgaccgccaacccacagatgttcgcccttgcccgcgagcatgccgaccgcaccgggcgagaagcggtgatgttcagttcgatactgcgcgcgcaggtgtcgctggcctgggtgattggccccccgctcgcctacgcgctggcgatgggttttggctttacggtgatgtacctcagcgcagccgtggccttcgtggtatgcggcgcaatggtctggttctttctgccctccatgcgcaaagagccgaaagtggcgaccggtacgctggaagctccgcgacgtaaccggcgcgacgcgctgctgttattcattatttgtacgctaatgtggggaaccaacagcctctatatcattaatatgccgctgtttattattgatgagttgcatctgccggagaagctggccgggatcatgatgggaaccgccgcggggcttgagatccccaccatgctgattgcgggctattacgcgaagcgcttcggcaagcgctttttgatgcgcgtcgccgccntagccgggctgctgttttatgtcggtatgctgacggttcatacgccagccttgcttcttgctttacagctgctgaacgccatttacatcggtatcctggccggtatcggcatgctctacttccaggatctgatgccgggtcaggcaggctctgccaccaccctttatactaataccacccgcgtgggctggattattgcaggctcactggcgggcgttgtggctgaaatctggaactatcatacggtgttctggattgcgctggtgatgtgcgtcctgacgctgagctgcctgacgcgaatcaaagacgtttaa

SEQ ID NO: 7336 - protein, 410 aa, Klebsiella oxytoca
  misc_feature (307)..(307): Xaa can be any naturally occurring amino acid
MTGGVNSASLCYSQRLNMHNTPAAASPKPFDLTSTAFLIVAFLTGIAGALQTPTLSLFLTNEVHARPAMVGFFFTGSAIIGIFVSQFLAGRSDRKGDRKSLIVFCCLLGVFACLLFAWNRNYFILLFVGVFLSSFGSTANPQMFALAREHADRTGREAVMFSSILRAQVSLAWVIGPPLAYALAMGFGFTVMYLSAAVAFVVCGAMVWFFLPSMRKEPKVATGTLEAPRRNRRDALLLFIICTLMWGTNSLYIINMPLFIIDELHLPEKLAGIMMGTAAGLEIPTMLIAGYYAKRFGKRFLMRVAAXAGLLFYVGMLTVHTPALLLALQLLNAIYIGILAGIGMLYFQDLMPGQAGSATTLYTNTTRVGWIIAGSLAGVVAEIWNYHTVFWIALVMCVLTLSCLTRIKDV

SEQ ID NO: 7337 - DNA, 2637 bp, Enterobacter cloacae
  misc_feature (259)..(259): n is a, c, g or t
atgagcgaccttgcgagagaaattacaccggttaacatcgaggaagagctgaaaagctcctatctggactatgcgatgtcggtcattgttggccgtgcgctgccggacgtccgcgatggcctgaagccggtacaccgtcgcgtactatacgccatgaacgtattgggcaatgactggaataaagcctacaaaaaatctgcccgtgtcgttggtgacgtaatcggtaaataccatcctcatggtgattacgcggtgtacnacaccattgtccgtatggcgcagcccttctcgctgcgttacatgctggtagatggtcagggtaactttggttctatcgacggcgactccgccgcggcaatgcgttatacggaaatccgtctggcgaagattgcccatgagctgatggctgacctggaaaaagagacggttgatttcgttgataactacgacggcacggaaaaaattcctgacgttatgccaacgaagatcccaaacctgctggtgaacggttcgtccggtatcgccgtcggtatggcaaccaacattccaccgcacaatatcacggaagtgatcaacggctgcctggcctacattgacgatgaagacatcagcattgaagggctgatggaacacatcccgggcccggacttcccgacggcggcaatcatcaatggccgtcgcggtattgaagaagcgtaccgcaccggtcgcggcaagatttacatccgtgcccgcgccgaagtggaagcggacgctaaaaccggccgtgaaaccattattgttcacgagatcccgtatcaggtgaacaaagcgcgactgattgaaaaaatcgccgagctggtaaaagaaaaacgcgttgaaggcatcagcgcgctgcgtgacgagtctgataaagacggtatgcgcatcgtgattgaaatcaagcgcgacgcggtgggtgaagttgtgttgaacaacctttactcccagactcagcttcaggtctccttcggtatcaacatggttgcgctgcaccatggccagccgaagatcatgaacctgaaagagatcctgagcgcgttcgtgcgtcaccgccgtgaagtggtgacccgtcgtaccatcttcgaactgcgcaaagcgcgcgaccgtgcccatatccttgaagcactggccgttgcgctggcgaacatcgacccgatcatcgagctgatccgccgtgcgccgacgccggcagaagcgaaggcgtcgctggttgcgcgtccatgggatctgggcaacgtggcggcaatgctggaacgtgccggtgatgacgccgcgcgtcctgagtggctggaaccggaattcggcgtgcgtgacggtcagtactacctgactgaacagcaggcccaggcgattctggatctgcgtttgcagaaactgaccggccttgagcatgaaaaactgctcgacgagtacaaagagctgctggagcagattgccgagctgctgcatatcctgggtagcgcagagcgcctgatggaagtgatccgtgaagagctggagctggttcgcgatcagttcggcgacgagcgtcgcaccgaaatcacagccaacagctctgatatcaacattgaagatctgatcaaccgcgaagacgtggtagtgacgctgtctcaccagggctacgtgaagtatcagccgttgaccgactacgaagcacagcgtcgtggcggtaaaggcaaatctgcggcgcgtattaaagaagaagactttattgaccgtctgctggtggccaacacccacgacacgatcctctgcttctccagccggggccgtctgtactggatgaaagtctatcagctgccggaagcgagccgtggcgcgcggggtcgaccaatcgtcaacctgctgccgctggaagcgaacgaacgtatcaccgccattctgccggtacgcgagtacgaagagggcgtgaacgtctttatggcgaccgcgagcggtaccgtgaagaaaactgcgctgaccgagttcagccgtccacgttctgccgggatcatcgcggtgaacctgaacgaaggcgatgagctgattggcgtggatctgacctccggttccgatgaagtgatgctgttctctgccgccggtaaagtggtgcgctttaaagagaacgccgtgcgcgcaatgggtcgtacggcgaccggcgtgcgtggtatcaagctggcgggtgaagacagcgtggtttccctgatcgttccgcgtggcgaaggcgcaatcctgaccgtcacccagaacggctacggtaaacgtacggcggaaagcgaatacccgaccaagtcacgcggcacgcagggcgttatctccatcaaagtgaccgagcgcaacggttccgttgttggcgcggtgcaggtggacgacgcggaccagatcatgatgatcaccgatgccggtacgctggtgcgtacccgcgtgtctgagatcagcgtggtgggtcgtaacacccagggcgttatcctcatccgcactgcggaagatgaaaacgtcgtcggtctgcaacgcgttgctgagccggtggatgacgaagagctcgactctatcgacggcagcgttgcggaaggggatgatgaaatcgccccggaagcggacaccgatgatgaagtagcggatgacgctgacgagtaa

SEQ ID NO: 7338 - protein, 878 aa, Enterobacter cloacae
  misc_feature (87)..(87): Xaa can be any naturally occurring amino acid
MSDLAREITPVNIEEELKSSYLDYAMSVIVGRALPDVRDGLKPVHRRVLYAMNVLGNDWNKAYKKSARVVGDVIGKYHPHGDYAVYXTIVRMAQPFSLRYMLVDGQGNFGSIDGDSAAAMRYTEIRLAKIAHELMADLEKETVDFVDNYDGTEKIPDVMPTKIPNLLVNGSSGIAVGMATNIPPHNITEVINGCLAYIDDEDISIEGLMEHIPGPDFPTAAIINGRRGIEEAYRTGRGKIYIRARAEVEADAKTGRETIIVHEIPYQVNKARLIEKIAELVKEKRVEGISALRDESDKDGMRIVIEIKRDAVGEVVLNNLYSQTQLQVSFGINMVALHHGQPKIMNLKEILSAFVRHRREVVTRRTIFELRKARDRAHILEALAVALANIDPIIELIRRAPTPAEAKASLVARPWDLGNVAAMLERAGDDAARPEWLEPEFGVRDGQYYLTEQQAQAILDLRLQKLTGLEHEKLLDEYKELLEQIAELLHILGSAERLMEVIREELELVRDQFGDERRTEITANSSDINIEDLINREDVVVTLSHQGYVKYQPLTDYEAQRRGGKGKSAARIKEEDFIDRLLVANTHDTILCFSSRGRLYWMKVYQLPEASRGARGRPIVNLLPLEANERITAILPVREYEEGVNVFMATASGTVKKTALTEFSRPRSAGIIAVNLNEGDELIGVDLTSGSDEVMLFSAAGKVVRFKENAVRAMGRTATGVRGIKLAGEDSVVSLIVPRGEGAILTVTQNGYGKRTAESEYPTKSRGTQGVISIKVTERNGSVVGAVQVDDADQIMMITDAGTLVRTRVSEISVVGRNTQGVILIRTAEDENVVGLQRVAEPVDDEELDSIDGSVAEGDDEIAPEADTDDEVADDADE

SEQ ID NO: 7339 - DNA, 2637 bp, Klebsiella pneumoniae
  misc_feature (248)..(248): n is a, c, g or t
atgagcgaccttgcgagagaaattacaccggttaacatcgaggaagagctgaaaagctcctatctggactatgcgatgtcggtcattgttggccgtgcgctgccggacgtccgcgatggcctgaagccggtacaccgtcgcgtactatacgccatgaacgtattgggcaatgactggaataaagcctacaaaaaatctgcccgtgtcgttggtgacgtaatcggtaaataccatcctcatggtgattncgcggtgtacgacaccattgtccgtatggcgcagcccttctcgctgcgttacatgctggtagatggtcagggtaactttggttctatcgacggcgactccgccgcggcaatgcgttatacggaaatccgtctggcgaagattgcccatgagctgatggctgacctggaaaaagagacggttgatttcgttgataactacgacggcacggaaaaaattcctgacgttatgccaacgaagatcccaaacctgctggtgaacggttcgtccggtatcgccgtcggtatggcaaccaacattccaccgcacaatatcacggaagtgatcaacggctgcctggcctacattgacgatgaagacatcagcattgaagggctgatggaacacatcccgggcccggacttcccgacggcggcaatcatcaatggccgtcgcggtattgaagaagcgtaccgcaccggtcgcggcaagatttacatccgtgcccgcgccgaagtggaagcggacgctaaaaccggccgtgaaaccattattgttcacgagatcccgtatcaggtgaacaaagcgcgactgattgaaaaaatcgccgagctggtaaaagaaaaacgcgttgaaggcatcagcgcgctgcgtgacgagtctgataaagacggtatgcgcatcgtgattgaaatcaagcgcgacgcggtgggtgaagttgtgttgaacaacctttactcccagactcagcttcaggtctccttcggtatcaacatggttgcgctgcaccatggccagccgaagatcatgaacctgaaagagatcctgagcgcgttcgtgcgtcaccgccgtgaagtggtgacccgtcgtaccatcttcgaactgcgcaaagcgcgcgaccgtgcccatatccttgaagcactggccgttgcgctggcgaacatcgacccgatcatcgagctgatccgccgtgcgccgacgccggcagaagcgaaggcgtcgctggttgcgcgtccatgggatctgggcaacgtggcggcaatgctggaacgtgccggtgatgacgccgcgcgtcctgagtggctggaaccggaattcggcgtgcgtgacggtcagtactacctgactgaacagcaggcccaggcgattctggatctgcgtttgcagaaactgaccggccttgagcatgaaaaactgctcgacgagtacaaagagctgctggagcagattgccgagctgctgcatatcctgggtagcgcagagcgcctgatggaagtgatccgtgaagagctggagctggttcgcgatcagttcggcgacgagcgtcgcaccgaaatcacagccaacagctctgatatcaacattgaagatctgatcaaccgcgaagacgtggtagtgacgctgtctcaccagggctacgtgaagtatcagccgttgaccgactacgaagcacagcgtcgtggcggtaaaggcaaatctgcggcgcgtattaaagaagaagactttattgaccgtctgctggtggccaacacccacgacacgatcctctgcttctccagccggggccgtctgtactggatgaaagtctatcagctgccggaagcgagccgtggcgcgcggggtcgaccaatcgtcaacctgctgccgctggaagcgaacgaacgtatcaccgccattctgccggtacgcgagtacgaagagggcgtgaacgtctttatggcgaccgcgagcggtaccgtgaagaaaactgcgctgaccgagttcagccgtccacgttctgccgggatcatcgcggtgaacctgaacgaaggcgatgagctgattggcgtggatctgacctccggttccgatgaagtgatgctgttctctgccgccggtaaagtggtgcgctttaaagagaacgccgtgcgcgcaatgggtcgtacggcgaccggcgtgcgtggtatcaagctggcgggtgaagacagcgtggtttccctgatcgttccgcgtggcgaaggcgcaatcctgaccgtcacccagaacggctacggtaaacgtacggcggaaagcgaatacccgaccaagtcacgcggcacgcagggcgttatctccatcaaagtgaccgagcgcaacggttccgttgttggcgcggtgcaggtggacgacgcggaccagatcatgatgatcaccgatgccggtacgctggtgcgtacccgcgtgtctgagatcagcgtggtgggtcgtaacacccagggcgttatcctcatccgcactgcggaagatgaaaacgtcgtcggtctgcaacgcgttgctgagccggtggatgacgaagagctcgactctatcgacggcagcgttgcggaaggggatgatgaaatcgccccggaagcggacaccgatgatgaagtagcggatgacgctgacgagtaa

SEQ ID NO: 7340 - protein, 878 aa, Klebsiella pneumoniae
  misc_feature (83)..(83): Xaa can be any naturally occurring amino acid
MSDLAREITPVNIEEELKSSYLDYAMSVIVGRALPDVRDGLKPVHRRVLYAMNVLGNDWNKAYKKSARVVGDVIGKYHPHGDXAVYDTIVRMAQPFSLRYMLVDGQGNFGSIDGDSAAAMRYTEIRLAKIAHELMADLEKETVDFVDNYDGTEKIPDVMPTKIPNLLVNGSSGIAVGMATNIPPHNITEVINGCLAYIDDEDISIEGLMEHIPGPDFPTAAIINGRRGIEEAYRTGRGKIYIRARAEVEADAKTGRETIIVHEIPYQVNKARLIEKIAELVKEKRVEGISALRDESDKDGMRIVIEIKRDAVGEVVLNNLYSQTQLQVSFGINMVALHHGQPKIMNLKEILSAFVRHRREVVTRRTIFELRKARDRAHILEALAVALANIDPIIELIRRAPTPAEAKASLVARPWDLGNVAAMLERAGDDAARPEWLEPEFGVRDGQYYLTEQQAQAILDLRLQKLTGLEHEKLLDEYKELLEQIAELLHILGSAERLMEVIREELELVRDQFGDERRTEITANSSDINIEDLINREDVVVTLSHQGYVKYQPLTDYEAQRRGGKGKSAARIKEEDFIDRLLVANTHDTILCFSSRGRLYWMKVYQLPEASRGARGRPIVNLLPLEANERITAILPVREYEEGVNVFMATASGTVKKTALTEFSRPRSAGIIAVNLNEGDELIGVDLTSGSDEVMLFSAAGKVVRFKENAVRAMGRTATGVRGIKLAGEDSVVSLIVPRGEGAILTVTQNGYGKRTAESEYPTKSRGTQGVISIKVTERNGSVVGAVQVDDADQIMMITDAGTLVRTRVSEISVVGRNTQGVILIRTAEDENVVGLQRVAEPVDDEELDSIDGSVAEGDDEIAPEADTDDEVADDADE

SEQ ID NO: 7341 - DNA, 1671 bp, Enterobacter cloacae
  misc_feature (592)..(592): n is a, c, g or t
atgtcagtaagttcttttaaccgacgctgggcggcggtgatccttgaagccctgacccgtcatggtgtcaggcatgtgtgtattgccccgggctctcgctccacgccgctcacccttgctgccgcggaaaaccgggcttttattcaccacacccattttgatgagcggggtctgggccatctggcgctcgggctggcgaaagtcagcaaagcgcccgtggcggtgatagtcacctccggcacggcggtggcgaacctgtatccggcgctgattgaagcgggattaaccggcgaaaagctgatattactcaccgccgaccgtcccccggaacttattgactgcggcgctaaccaggcgattcgtcagcctggcatttttgcctcgcatccttcacagacggtctcgttgccgcgccccactcaggacattcccgccagctggctggtctcaactctcgaccacgccatgaacgcactgcgcagcggcgggctgcacattaactgcccgtttgccgagccgctgtacggcgaaatgaacgatactggcctcgtctggcaacagcagctgggagactggtgggagagcgaaaaancctggctgcgcgagcagacgcatctggaaagcgcaaaacagcgcgactggttcttctggcgccagaagcgcggcgtggtgattgccgggcggatgagtgcggcggaaggcaagctggcggcggagtgggcacaaacgcttggctggccgctgattggtgacgtgctttcccagacgggccagccgctgccctgcgccgacctctggctgggtaacgcgaaagcggttaccgaactggcgcaggcgcagattgtcgtccagctgggatcgagcctgacggggaagcgtctgctccagtggcaggccacctgtaccccagaagagtactggctggtggatccgctcgaaggacgccttgacccggcgcaccatcgcggccgccgcctggtgagcaacattgacagctggctggaattgcatccggcggaaaaacgcaaaccctgggcggtggagatcccggcgctgtcacgtcaggcgtgggaactcaccaaagcgcagtgcgaggcgttcagtgaagccgggctggcgcaccgtatccgcaaatatcttcccgagcagggacaactttttgtcggtaacagcctggtggtgcgcctgattgacgccttttcgcagctgccggcgggttatccggtgtacagcaaccggggcgcgagcggcattgacggcctgatctccaccgccgctggcgtacagcgggccagcgcgaaatccacgctggcgattgtgggggatctctcagccctctacgatctcaacgcgctggcgctcctgcgtcgggcgtcggccccgttcgtgctgattgttgtgaacaataacggcgggcagattttctcgttgctgccgacgccgcaaagcgagcgtgagcgcttctatctgatgccgcaaaacgtgcagttcgaacacgccgccgccatgttcagcctgaagtaccatcgcccggaaaactgggacgcgctggagacggcgctgaacaccgcctggcggcagcctggcgcgacgctgattgagctggtggtaaacgatgctgacggcgcgcagaagctgcaacatctgcttgcgcaggtgagtcacctgtga

SEQ ID NO: 7342 - protein, 556 aa, Enterobacter cloacae
  misc_feature (198)..(198): Xaa can be any naturally occurring amino acid
MSVSSFNRRWAAVILEALTRHGVRHVCIAPGSRSTPLTLAAAENRAFIHHTHFDERGLGHLALGLAKVSKAPVAVIVTSGTAVANLYPALIEAGLTGEKLILLTADRPPELIDCGANQAIRQPGIFASHPSQTVSLPRPTQDIPASWLVSTLDHAMNALRSGGLHINCPFAEPLYGEMNDTGLVWQQQLGDWWESEKXWLREQTHLESAKQRDWFFWRQKRGVVIAGRMSAAEGKLAAEWAQTLGWPLIGDVLSQTGQPLPCADLWLGNAKAVTELAQAQIVVQLGSSLTGKRLLQWQATCTPEEYWLVDPLEGRLDPAHHRGRRLVSNIDSWLELHPAEKRKPWAVEIPALSRQAWELTKAQCEAFSEAGLAHRIRKYLPEQGQLFVGNSLVVRLIDAFSQLPAGYPVYSNRGASGIDGLISTAAGVQRASAKSTLAIVGDLSALYDLNALALLRRASAPFVLIVVNNNGGQIFSLLPTPQSERERFYLMPQNVQFEHAAAMFSLKYHRPENWDALETALNTAWRQPGATLIELVVNDADGAQKLQHLLAQVSHL

SEQ ID NO: 7343 - DNA, 1803 bp, Enterobacter roggenkampii
  misc_feature (1303)..(1303): n is a, c, g or t
atggtgaacaatatgaccgacttaaccgcgcaagaagccgcctggcagacccgggatcatctcgatgaccccgtcattggcgaactgcgcaaccgttttgggccggatgcttttactgttcaggccacccgcaccggggtacccgttgtttgggtgaagcgtgagcaattactggaagttgtcgatttcctcaagaaattgccaaaaccttacgtcatgctgtttgacttacacggcatggacgaacgtctgagaacgcaccgccagggtctccctgctgcggatttttccgttttctaccacctgatctcaatagaccgcaacacggatatcatgctcaaggtggcattgtctgaaaacgacatgcatctgccgacgatcaccaaacttttcccgaacgccaactggtacgagcgtgaaacctgggaaatgttcggcatgaccttcgacggtcacccgcatctgacgcgcatcatgatgccgcagacctggaccggccacccgctgcgtaaagactacccggcacgcgccaccgaatttgacccgtttgagctgaccaaagccaagcaggatctggagatggaagcgctgaccttcaaaccggaagactggggcatgaagcgcggcaccgaaaacgaggacttcatgttcctcaacctcggtccaaaccacccgtctgcgcacggtgcattccgtattattcttcagcttgatggcgaagagattgtcgactgcgtgcctgacatcggctaccaccaccgtggtgccgagaagatgggcgagcgtcagtcctggcacagctacattccgtacaccgaccgtatcgaatacctcggcggctgcgtgaacgaaatgccatacgtgctggccgttgagaagctggcaggcatcaccgtcccggatcgcgttaacgtgattcgcgtgatgctgtctgaactgttccgtattaacagccacctgctgtacatctccacgttcattcaggacgtcggcgcgatgacgccggtcttcttcgcctttaccgaccgtcagaaaatctacgatctggtggaagcgattaccggtttccgtatgcacccggcctggttccgcatcggcggtgtggcgcacgatctgccgcgcggctgggaccgtctgctgcgtgaattcctcgactggatgccaaaacgtctggcgtcttacgagaaagccgcgctgcgtaactccatcctgaaaggccgttcccagggcgttgctgcctacggcgcgaaagaagcgctggagtggggaaccacaggtgcaggtctgcgtgcgaccgggattnatttcgacgtgcgtaaagcccgtccttactctggttacgagaacttcgactttgaagtcccggtgggcggcggcgtatccgactgctatacccgcgtgatgctgaaagtggaagagctgcgccagagcctgcgcatcctagagcagtgcctcaacaacatgccggaaggcccgttcaaggcggatcacccgctgacgacgccgccaccgaaagagcgcacgctgcaacatatcgaaaccctgatcacccacttcctgcaagtttcctggggcccggtcatgccggcacaggaatccttccagatgattgaagcgaccaagggtatcaacagctactacctcaccagcgacggcagcaccatgagctaccgcacccgcgtgcgtacgccaagcttcgcacacttgcagcagatcccggccgccattcgcggcagtctggtctccgacctgattgtgtatctgggtagtatcgattttgttatgtcagatgtggaccgctaa

SEQ ID NO: 7344 - protein, 600 aa, Enterobacter roggenkampii
  misc_feature (435)..(435): Xaa can be any naturally occurring amino acid
MVNNMTDLTAQEAAWQTRDHLDDPVIGELRNRFGPDAFTVQATRTGVPVVWVKREQLLEVVDFLKKLPKPYVMLFDLHGMDERLRTHRQGLPAADFSVFYHLISIDRNTDIMLKVALSENDMHLPTITKLFPNANWYERETWEMFGMTFDGHPHLTRIMMPQTWTGHPLRKDYPARATEFDPFELTKAKQDLEMEALTFKPEDWGMKRGTENEDFMFLNLGPNHPSAHGAFRIILQLDGEEIVDCVPDIGYHHRGAEKMGERQSWHSYIPYTDRIEYLGGCVNEMPYVLAVEKLAGITVPDRVNVIRVMLSELFRINSHLLYISTFIQDVGAMTPVFFAFTDRQKIYDLVEAITGFRMHPAWFRIGGVAHDLPRGWDRLLREFLDWMPKRLASYEKAALRNSILKGRSQGVAAYGAKEALEWGTTGAGLRATGIXFDVRKARPYSGYENFDFEVPVGGGVSDCYTRVMLKVEELRQSLRILEQCLNNMPEGPFKADHPLTTPPPKERTLQHIETLITHFLQVSWGPVMPAQESFQMIEATKGINSYYLTSDGSTMSYRTRVRTPSFAHLQQIPAAIRGSLVSDLIVYLGSIDFVMSDVDR

SEQ ID NO: 7345 - DNA, 600 bp, Citrobacter pasteurii
  misc_feature (541)..(541): n is a, c, g or t
atgagtcagagtcatttctttgcccacctctcccgcctgaaactcatcaaccgctggccgctgatgcgcaatgtgcgtactgaaaatgtgtctgagcacagtttgcaggttgccatggtcgcgcacgcgctggccgcgattaaaaaccgcaaattcaacgggcaggtgaatgccgaacgtatcgccctgctggcgatgtatcacgatgcatcggaagtgctgaccggggatctgcctacgccggtgaaatatttcaactcgcagattgcccaggaatataaggccattgagaagattgcccagcagaagctgatcgacatggtgcctgaagagctgcgcgatatcttcgggccgctgatcgatgagcatcagtatacggaagaggagaaatccctggttaagcaggccgatgcgctgtgcgcctacctgaagtgtctggaagaactgtccgccgggaataacgaatttttactggcaaaaacgcgtctggaaaaaacgctggaatctcgtcgcagcgaagagatggactactttatgcgcntgtttgtgccgagcttccatttgtcgctggatgagattagccaggattcgccactctga

SEQ ID NO: 7346 - protein, 199 aa, Citrobacter pasteurii
  misc_feature (181)..(181): Xaa can be any naturally occurring amino acid
MSQSHFFAHLSRLKLINRWPLMRNVRTENVSEHSLQVAMVAHALAAIKNRKFNGQVNAERIALLAMYHDASEVLTGDLPTPVKYFNSQIAQEYKAIEKIAQQKLIDMVPEELRDIFGPLIDEHQYTEEEKSLVKQADALCAYLKCLEELSAGNNEFLLAKTRLEKTLESRRSEEMDYFMRXFVPSFHLSLDEISQDSPL

SEQ ID NO: 7347 - DNA, 1014 bp, Enterobacter cloacae
  misc_feature (226)..(226): n is a, c, g or t
atgtctgaaggctggaacattgccattttgggtgccactggcgccgtgggcgaagccctgcttgaaacccttgctgagcgtcagttcccggtgggtgagatttacgcactggcgcgtaccgacagcgcaggagaacatctgcgtttcggcggcaaatccgtgatggtgcaggatgccgccgcgtttgactggacgcaggctcagctggcgttttttgccgcaggtncggaagccacggcgtcttacattgaagaagcgaccagttcaggctgtctggtgatcgacctgagcggcctgttctccctggagccggatgtgccgctggtggtgccggacgtcaacccgtttgtgctggctgactaccgcaaccgcaacatcattgcagtaccgaacagcctcaccagccagctgctgaccgcgctgaagccgctgatcgacgacggtggcctgtcgcgtgtttccgtgaccagcctgctttcagcctccgctaacggtaaaaaagccgtagacgcactggcagggcagagcgcgaagctgttgaacggtatcccgatcgacgaagatgatttctttggccgccagctggcgttcaacatgctgccgctgctgccggatcgtgaaggttcggtgcgggaagagcgtcgtatcgtcgatgaagcacgcaaaattttgcaggatgacgggctgatgatctccgcgaatgtcgtgcagtctccggtcttttacggccacgcgcagatggtcgggtttgaagccctgcgtccgctggcggctgaagaagcccgcgacgcgtttggccgcggtgaggacattgtcctgtccgaagagagcgaattcccgacgcaggtgggcgacgccaccggcagcgcgcatctctctgtgggctgcgtgcgtaacgattacggtatgccggagcaggtgcagttctggtccgttgccgacaacgtgcgttttggcggcgcgctgatggcggtcaaaatcgcggaaaaactggtgcaggagtatctgtactga

SEQ ID NO: 7348 - protein, 337 aa, Enterobacter cloacae
  misc_feature (76)..(76): Xaa can be any naturally occurring amino acid
MSEGWNIAILGATGAVGEALLETLAERQFPVGEIYALARTDSAGEHLRFGGKSVMVQDAAAFDWTQAQLAFFAAGXEATASYIEEATSSGCLVIDLSGLFSLEPDVPLVVPDVNPFVLADYRNRNIIAVPNSLTSQLLTALKPLIDDGGLSRVSVTSLLSASANGKKAVDALAGQSAKLLNGIPIDEDDFFGRQLAFNMLPLLPDREGSVREERRIVDEARKILQDDGLMISANVVQSPVFYGHAQMVGFEALRPLAAEEARDAFGRGEDIVLSEESEFPTQVGDATGSAHLSVGCVRNDYGMPEQVQFWSVADNVRFGGALMAVKIAEKLVQEYLY

SEQ ID NO: 7349 - DNA, 2247 bp, Enterobacter cloacae complex
  misc_feature (1946)..(1946): n is a, c, g or t
atgctcacccgcttgcgagaaatagttgaaaaggttgccagtgcgcctcgcctcaacgaggcgctgaatattctggtgacggacatctgtcttgcgatggaaaccgaggtctgttcggtctacctggccgaccatgaccgacgttgctactacctgatggcaacccgcggtttaaaaaaaccacggggacgcaccgtcacgctcgcgtttgatgaaggtattgttggcctggtcgggcgactggcggagccaatcaaccttgccgatgcgcaaaaacatcccagcttcaaatatatcccttccgtcaaagaggagcggttccgcgctttccttggcgtgccgattattcagcgccgtcaactgcttggcgtgcttgttgtccagcaacgagagttgcggcagtacgacgaaagcgaggagtctttcctcgtcacgctggcaacgcagatggctgcgatcctctcccagtctcagctggcagccctttttgggcagtatcgtcatacccgcatccgcgcgcttccggcctcgccgggcgtcgcgattgccgaaggctggatggatgccacgctccccctgatggagcaggtctatgaagcctcgacgctggatgaagcgcttgagcgcgaacggcttaccgctgcgctggaagaggcggcgaatgagtttcgtcgctacagcaaacgctttgccgctggcgctcaaaaagagacggcggccattttcgacctctactcacacctgctttccgatgcgcgtttgcgtcgtgagttatttgccgaggtcgataaaggttcggtggcagagtgggcggttaaaaaggtcattgaaaaatttgccgagcagtttgcggtgctgactgacggttatctgaaagagcgcgccggcgatttacgcgcgcttgggcaacgtctgctgttccaccttgatgatactattcagggggcgaatgcctggccgagccggtttgtactggtggccgatgaactctcggcgacgacgctggcggaattaccgcaggacaggctggcgggcgtagtggtgcgcgatggcgcagctaactcccatgccgccattatggtgcgcgcgctcggtattccgaccgtgatgggggcggatattcagccctccgtactgcaccgccgtacgctggtggtggacggataccgcggtgagttgctggtggatcctgagccggttctccttcaggagtaccagcgtcttatcagcgaagagaatgaattaagcaagctggcggaagatgacgtcaacctgcccgcgcagctcaagagcggtgagcgtgtgaaggtgatgctcaatgctggcttaagccccgagcatgaagagaagctcggcagccgcatcgatggcatcggcctctaccgcaccgaaataccgtttatgctgcaaagcggcttcccgtcagaagaggagcaggtggcgcagtatcaaggcatgttgcagatgtttaacgacaaacccgtcacgttgcgcaccctggacgtcggcgcggataagcaactgccctatatgcccatcagtgaagagaatccctgcctcggctggcgtgggatccgcataaccctcgatcagccggaaatcttccttatccaggttcgtgcgatgctgcgtgccaacgcggccacggggaatctcagcattttgctgccgatggtcaccagtattgacgagatcgacgaagcgcggcggttgatagaacgtgcagggcgcgaagtggaagagatgatcggctatgcgatccctaaaccccgtattggcgtgatgcttgaagtgccttcgatggtctttatgttgccgcagctggcgacccgcgttgattttatctccgttggcaccaacgacttaacgcaatacattctggcggtcgatcgcaacaatacgcgcgttgccagcatctacgatagcctgcatccggcgatgcttcntgccctggcgatgatcgcccgcgaagccgagcagcataatatcgacctgcgcctgtgcggtgaaatggccggcgatccgatgtgcgtggcgatcctgattggtctcggtttccgtcacctgtcaatgaacggacgttccgttgcgcgtgtgaaatacctgttacgtcacatcgaacaagatgaggcgcgcgaactggccgcgcgtagcctggaagcacagctggcagccgaagtgcgccatcaggtggctgcgtttatggagcgacgcggcatgggcggtttgatccggggcggccgctga

SEQ ID NO: 7350 - protein, 748 aa, Enterobacter cloacae complex
  misc_feature (649)..(649): Xaa can be any naturally occurring amino acid
MLTRLREIVEKVASAPRLNEALNILVTDICLAMETEVCSVYLADHDRRCYYLMATRGLKKPRGRTVTLAFDEGIVGLVGRLAEPINLADAQKHPSFKYIPSVKEERFRAFLGVPIIQRRQLLGVLVVQQRELRQYDESEESFLVTLATQMAAILSQSQLAALFGQYRHTRIRALPASPGVAIAEGWMDATLPLMEQVYEASTLDEALERERLTAALEEAANEFRRYSKRFAAGAQKETAAIFDLYSHLLSDARLRRELFAEVDKGSVAEWAVKKVIEKFAEQFAVLTDGYLKERAGDLRALGQRLLFHLDDTIQGANAWPSRFVLVADELSATTLAELPQDRLAGVVVRDGAANSHAAIMVRALGIPTVMGADIQPSVLHRRTLVVDGYRGELLVDPEPVLLQEYQRLISEENELSKLAEDDVNLPAQLKSGERVKVMLNAGLSPEHEEKLGSRIDGIGLYRTEIPFMLQSGFPSEEEQVAQYQGMLQMFNDKPVTLRTLDVGADKQLPYMPISEENPCLGWRGIRITLDQPEIFLIQVRAMLRANAATGNLSILLPMVTSIDEIDEARRLIERAGREVEEMIGYAIPKPRIGVMLEVPSMVFMLPQLATRVDFISVGTNDLTQYILAVDRNNTRVASIYDSLHPAMLXALAMIAREAEQHNIDLRLCGEMAGDPMCVAILIGLGFRHLSMNGRSVARVKYLLRHIEQDEARELAARSLEAQLAAEVRHQVAAFMERRGMGGLIRGGR

SEQ ID NO: 7351 - DNA, 1518 bp, Citrobacter rodentium
  misc_feature (1216)..(1216): n is a, c, g or t
atgtctgaacaacaagcacagggcgctgacgcggtagtcgatcttaacaacgaactgaaaacccgccgcgagaagctggcagcgctgcgcgagcagggcgtgccgttcccgaacgattttcgtcgtgaccacacctcagaccaactgcacgcagacttcgacggtaaagagaacgaagagctggaagcgctgaacgttgaagtgtccgtggcgggccgcatgatgacccgtcgtatcatgggtaaagcgtccttcgtgaccttacaggacgttggcggccgcattcagctgtacgtctctcgtgacgacctgccggaaggcatctacaacgagcagttcaaaaagtgggacctcggcgatatcctgggcgctaaaggtaaactgttcaaaaccaagaccggtgaactgtctatccactgcaccgaactgcgtctgctgaccaaagccctgcgcccgctgccggacaagttccacggtttgcaggatcaggaagcgcgctatcgtcagcgttacctggatctcatctctaacgatgaatcccgtaagaccttcaaaattcgctcccagatcatggccggtattcgccagttcatggttaaccgcgactttatggaagtagaaaccccgatgatgcaggtgatcccaggcggtgcctctgcccgtccgttcatcacccatcacaacgccctggacctggacatgtacctgcgtatcgcgccggaactgtacctgaagcgtctggtggtcggcggtttcgaccgcgtgtttgagatcaaccgtaacttccgtaacgaaggtatctccgtacgtcataacccagagttcaccatgatggaactctatatggcgtatgcggattacaaagatctgatcgagctgaccgaatccctgttccgcaccctggcgcaggacattctgggcaccacccaggtgccttacggtgaagaggtgttcgacttcggcaagccgttcgaaaaactgaccatgcgcgaagcgatcaagaaataccgtccggaaaccaacatggcggatctggataacttcgactctgcgaaagcgatcgctgaaagcatcggtatcaaggttgagaagagctggggcctgggtcgtatcgtgaccgaaatcttcgaagaagtggccgaagcgcacctgattcagccgaccttcatcaccgaatacccggcggaggtgtctcccctggcgcgtcgtaatgacnagaacccggaaatcaccgatcgcttcgaattcttcatcggtggccgcgaaatcggtaacggctttagcgagctgaacgatgcagaagatcaggcgcagcgcttccaggatcaggttaacgcgaaagcggcaggcgacgacgaagcgatgttcttcgacgaagactacgtgaccgcgctggagcacggcctgccgccgacggctggcctgggtattggtatcgaccgtatggtgatgctgttcaccaacagccacaccatccgcgacgtgatcctgttcccggcgatgcgtccggtgaaataa

SEQ ID NO: 7352 - protein, 505 aa, Citrobacter rodentium
  misc_feature (406)..(406): Xaa can be any naturally occurring amino acid
MSEQQAQGADAVVDLNNELKTRREKLAALREQGVPFPNDFRRDHTSDQLHADFDGKENEELEALNVEVSVAGRMMTRRIMGKASFVTLQDVGGRIQLYVSRDDLPEGIYNEQFKKWDLGDILGAKGKLFKTKTGELSIHCTELRLLTKALRPLPDKFHGLQDQEARYRQRYLDLISNDESRKTFKIRSQIMAGIRQFMVNRDFMEVETPMMQVIPGGASARPFITHHNALDLDMYLRIAPELYLKRLVVGGFDRVFEINRNFRNEGISVRHNPEFTMMELYMAYADYKDLIELTESLFRTLAQDILGTTQVPYGEEVFDFGKPFEKLTMREAIKKYRPETNMADLDNFDSAKAIAESIGIKVEKSWGLGRIVTEIFEEVAEAHLIQPTFITEYPAEVSPLARRNDXNPEITDRFEFFIGGREIGNGFSELNDAEDQAQRFQDQVNAKAAGDDEAMFFDEDYVTALEHGLPPTAGLGIGIDRMVMLFTNSHTIRDVILFPAMRPVK

SEQ ID NO: 7353 - DNA, 981 bp, Enterobacter cloacae
  misc_feature (472)..(472): n is a, c, g or t
atggcatttacaccattttctcctcgccagcccgccgcctctgcgcgtctgccgctgacgctgattactcttgatgactgggcactggcgacactgactggtgcggacagtgaaaaatacctgcaaggccaggtcacggcggacgtggcgcagttgactgagcaccagcatctgctggccgcgcattgcgatccaaaaggcaaaatgtggagcaacctgcgtctgttccgccgtcaggacggattcgcctttattgagcgccgcagcctgcgtgacgcccagcttaaagagctgaaaaaatacgcggtcttttctaaagtcaccatcgccccggacgatgaacacgttctgctgggggtcgcgggtttccaggcgcgtgcagcgctgaaaaacctgtttgccgagctgccggatgctgaaaaacagctggtcagcgagggagcgacctccattctgtggttcgaacacccgncggagcgcttcctgctggtaaccgacgaagcaacggcggaacgcgtcactgacgccctgcgcggtgaagcacagctcaacaacagccagcagtggctggcgctgaacatcgaagcgggcctgccggtgattgacgcggcaaacagcgcgcagtttatcccgcaggcgacaaacatccaggcgctgggtggtatcagctttaagaagggctgctacaccggtcaggaaatggtggcgcgtgcgaaattccgcggcgcgaacaaacgcgccctgtggacgctggctggtcacgccagccgtgtgccggaagcgggtgaagatcttgagatgaagatgggcgaaaactggcgccgtaccggcaccgtgttagccgccgtccagctcgatgatggccgcctgctggtgcaggttgtcatgaataatgatatggagcccgacagcgtgttccgcgtgcgggatgatgcaaacacgctcagcattgagccgctaccgtattctctggaagattga

SEQ ID NO: 7354 - protein, 326 aa, Enterobacter cloacae
  misc_feature (158)..(158): Xaa can be any naturally occurring amino acid
MAFTPFSPRQPAASARLPLTLITLDDWALATLTGADSEKYLQGQVTADVAQLTEHQHLLAAHCDPKGKMWSNLRLFRRQDGFAFIERRSLRDAQLKELKKYAVFSKVTIAPDDEHVLLGVAGFQARAALKNLFAELPDAEKQLVSEGATSILWFEHPXERFLLVTDEATAERVTDALRGEAQLNNSQQWLALNIEAGLPVIDAANSAQFIPQATNIQALGGISFKKGCYTGQEMVARAKFRGANKRALWTLAGHASRVPEAGEDLEMKMGENWRRTGTVLAAVQLDDGRLLVQVVMNNDMEPDSVFRVRDDANTLSIEPLPYSLED

SEQ ID NO: 7355 - DNA, 3888 bp, Enterobacter roggenkampii
  misc_feature (373)..(373): n is a, c, g or t
atgatggaatttctgcgtggttcgcctgcactgtctgccttccgtattaacaaactgctggcacgttttcaggcggccgaccttccggtaagcaatatttacgctgagtatgtccattttgctgacctgaatgcccccctgaatgcagaggagcgcgtacagctggaacgcctgcttaaatatggcccaagcctgagcagccatacgccgaccggcaaattaatcctcgccacgccacgccctggcaccatctccccctggtcttccaaagccaccgacatcgctcacaactgcggcctgagccagattaaccgtctggagcgcggcgtggcgtactatgtggaagcatcaaccctgagcgacgcgcagtggnaggtggttgccgcagagctgcacgaccgcatgatggagagcgtgtttgactctctggatgatgcgcagaaactgttctcccaccatcagcctgcgccgttacagagcgtggatctgcttgggcaggggcgtcaggcgctgatcgacgcaaacctgcgtcttggtctggcgctcgcagaagatgaaatcgactaccttcaggatgcattcgttaagctgaatcgcaacccgaacgacatcgaactgtatatgttcgcgcaggccaactccgagcactgccgccacaagattttcaacgccgactggattatcgacggcgaacagcagccgaagtcgctgttcaaaatgatcaaaaacaccatggagcaaacccctgaccacgtgctgtctgcctataaagacaacgccgcggtgatggaaggttccgaggtgggccgcttcttcgccgaccgcgaagcggggcgctatgacttccaccaggagcctgcgcatatcctgatgaaagtggaaacccacaaccacccgacggcgatctccccgtggccgggtgcagcgaccggctccggcggtgaaatccgtgacgaaggtgcgaccggtcgcggcgcgaaaccaaaagcgggtctggtcggtttctccgtttccaacctgcgtattccgggctttgagcagccgtgggaagaagacttcggcaagccagagcgcattgtcaccgcgctggatatcatgaccgaaggcccgctgggcggcgcggcgttcaacaacgaatttggtcgtccggcgctgaacggttacttccgtacctacgaagagaaagtggacagccacaacggcgaagagctgcgcggctaccacaaaccgatcatgctggcgggcgggatcggcaacattcgcgccgatcatgtgcagaaaggcgagatcgtcgtcggcgcgaagctgatcgtgctcggcggcccggcaatgaacatcggtctgggcggcggggcagcctcgtctatggcttccggccagtctgatgcggatctcgacttcgcatccgtgcagcgcgacaacccggaaatggagcgccgttgtcaggaagtgatcgaccgctgctggcagctgggcgatgccaacccgattctgttcatccacgacgtgggcgcgggtggcctgtccaacgctatgcctgagctggtgagcgacggcggtcgcggcggacgcttcaacctgcgcgatatcctgagcgatgagtcgggcatgagcccgctggaaatctggtgtaacgaatcccaggagcgctacgtgctggcggttgccgccgatcagctgccgctgtttgacgagctgtgccgccgcgagcgcgcgccgtatgccgtcatcggtgaagcgaccgaagagcagcacctttccttaagcgacacccattttgacaaccagccgatcgatctgccgctggacgtgctgctcggcaaaacgccgaagatgacccgcgacgtgcagactcgcaaagcggcgggcaaagcgctggatcgccagggcatcaccgtggcagaagcggttaaccgcgtgctgcacctgcctgccgtggcagagaaaaccttcctggtcaccatcggcgaccgtaccgtgaccggtatggtatcgcgcgatcagatggtcggcccgtggcagatcccggtcgctaactgcgccgtgaccaccgcgagcctcgacagctactacggcgaagcgatggcgctgggcgaacgcacgccagtggcgctgctggacttcgccgcttctgcccgtctggcggtcggtgaagcgctgaccaacatcgccgcgacgcagattggcgatatcaaacgcatcaaactttccgcgaactggatggccgctgccggtcacccgggcgaagatgccggcctgtacgaagcggtgaaagcggtgggtgaagagctgtgtcctgcgctcggcctgaccattccggtgggtaaagactccatgtcgatgaaaacccgctggcaggaaggtaacgagcagcgcgagatgacctctccgctgtcgctggtgatcaccgcgtttgcgcgcgtggaagacgtgcgtcataccgttacgccgcagctttccactcaagataacgccctgctgttgattgacctcggcaaaggccataacgcgctgggcgccaccgcgctggcgcaggtttaccgccagctcggcgataagccagccgacgtgcgcgatgtcgcccagctgaaaggcttctacgacgcaattcaggcgctggtggcgcatcgtaagctgctggcctaccacgaccgttccgatggtggcctgctggtgacgctggcagagatggccttcaccggtcactgcggcgttgaagcaaacattgcaacgcttggcgaagaccgcctggcggcgctgtttaacgaagagcttggcgcggtcattcaggtacgcgccgcagatcgcgacgcggtggaagcgattctggcgcagcacggtctggcagactgcgtacactatctcggtaaagcggtgcagggcgaccgcttcgtgattgaagccgacggccacgcggtgttcagcgaaagccgcaccacgctgcgtatgtggtgggcggaaaccacctggcagatgcagcgcctgcgtgacaatccggaatgcgccgatcaggaacacaacgcgaaggcgaacgacaacgatcctggcctgaacgtgaagctcagcttcgacattaacgaagacattgccgcgccgtacattgcgaccggtgcgcgtccgaaagtagccgtgctgcgcgagcagggcgttaactcccacgttgagatggcggcggccttccaccgggcgggctttgacgccatcgacgtccacatgagcgacctgctggccgggcgtaccgggctggaagatttccaggcgctggtggcgtgcggcggtttctcctacggcgacgtgctgggcgcgggcgaaggctgggcgaagtctattctgttcaacagccgcgtgcgtgacgagttcgaaaccttcttccatcgtccgcagacgctggcgctgggcgtgtgtaacggctgtcagatgatgtctaacctgcgcgagctgatcccgggcagcgaagcctggccgcgctttgtgcgtaaccagtctgaccgcttcgaagcgcgcttcagcctggtagaagtgacccaaagcccgtctctgctgttgcagggaatggtcggttcacagatgccaatcgcggtttcgcacggtgaaggtcaggttgaagtgcgtgatgcggcgcacctggctcagcttgaaagcaaaggactggtggcgctgcgctttgttgataacttcggcaaggtcaccgaaacctatccggctaacccgaacggttcggcaaatggcattaccgccgtcaccagcgacagcggtcgggtgacgatcatgatgccgcacccggaacgtgtcttccgtaccgtgagcaactcctggcacccggaaaactggggcgaggacagcccgtggatgcgcattttccgcaacgcgcgtaaacaactgggttaa

SEQ ID NO: 7356 - protein, 1295 aa, Enterobacter roggenkampii
  misc_feature (125)..(125): Xaa can be any naturally occurring amino acid
MMEFLRGSPALSAFRINKLLARFQAADLPVSNIYAEYVHFADLNAPLNAEERVQLERLLKYGPSLSSHTPTGKLILATPRPGTISPWSSKATDIAHNCGLSQINRLERGVAYYVEASTLSDAQWXVVAAELHDRMMESVFDSLDDAQKLFSHHQPAPLQSVDLLGQGRQALIDANLRLGLALAEDEIDYLQDAFVKLNRNPNDIELYMFAQANSEHCRHKIFNADWIIDGEQQPKSLFKMIKNTMEQTPDHVLSAYKDNAAVMEGSEVGRFFADREAGRYDFHQEPAHILMKVETHNHPTAISPWPGAATGSGGEIRDEGATGRGAKPKAGLVGFSVSNLRIPGFEQPWEEDFGKPERIVTALDIMTEGPLGGAAFNNEFGRPALNGYFRTYEEKVDSHNGEELRGYHKPIMLAGGIGNIRADHVQKGEIVVGAKLIVLGGPAMNIGLGGGAASSMASGQSDADLDFASVQRDNPEMERRCQEVIDRCWQLGDANPILFIHDVGAGGLSNAMPELVSDGGRGGRFNLRDILSDESGMSPLEIWCNESQERYVLAVAADQLPLFDELCRRERAPYAVIGEATEEQHLSLSDTHFDNQPIDLPLDVLLGKTPKMTRDVQTRKAAGKALDRQGITVAEAVNRVLHLPAVAEKTFLVTIGDRTVTGMVSRDQMVGPWQIPVANCAVTTASLDSYYGEAMALGERTPVALLDFAASARLAVGEALTNIAATQIGDIKRIKLSANWMAAAGHPGEDAGLYEAVKAVGEELCPALGLTIPVGKDSMSMKTRWQEGNEQREMTSPLSLVITAFARVEDVRHTVTPQLSTQDNALLLIDLGKGHNALGATALAQVYRQLGDKPADVRDVAQLKGFYDAIQALVAHRKLLAYHDRSDGGLLVTLAEMAFTGHCGVEANIATLGEDRLAALFNEELGAVIQVRAADRDAVEAILAQHGLADCVHYLGKAVQGDRFVIEADGHAVFSESRTTLRMWWAETTWQMQRLRDNPECADQEHNAKANDNDPGLNVKLSFDINEDIAAPYIATGARPKVAVLREQGVNSHVEMAAAFHRAGFDAIDVHMSDLLAGRTGLEDFQALVACGGFSYGDVLGAGEGWAKSILFNSRVRDEFETFFHRPQTLALGVCNGCQMMSNLRELIPGSEAWPRFVRNQSDRFEARFSLVEVTQSPSLLLQGMVGSQMPIAVSHGEGQVEVRDAAHLAQLESKGLVALRFVDNFGKVTETYPANPNGSANGITAVTSDSGRVTIMMPHPERVFRTVSNSWHPENWGEDSPWMRIFRNARKQLG

SEQ ID NO: 7357 - DNA, 351 bp, Enterobacter cloacae complex
  misc_feature (133)..(133): n is a, c, g or t
atgcaggttccggaactgacggatgacgccgtggttgagctggcccgggaaggcggcgtcgcctttatccctaagctgagcggccagcgcaccattgcgctctcctcgcttaatgaggcccagcgccagcgcntggtgagcattcttgagcaggctttcccgcgcggccagccgcccgggcaagcctcttcccccggcagcggtgaccagcgctatttccgcatccagattatctggaccggccaaaatcaggcgcactacgccgatatcatcgtgctggtacccgagcaggaagcacccgagtcgctggtggaactgtggcagaaaggtgaaggctgcgtgtgcgattaa

SEQ ID NO: 7358 - protein, 116 aa, Enterobacter cloacae complex
  misc_feature (45)..(45): Xaa can be any naturally occurring amino acid
MQVPELTDDAVVELAREGGVAFIPKLSGQRTIALSSLNEAQRQRXVSILEQAFPRGQPPGQASSPGSGDQRYFRIQIIWTGQNQAHYADIIVLVPEQEAPESLVELWQKGEGCVCD

SEQ ID NO: 7359 - DNA, 1431 bp, Enterobacter cloacae
  misc_feature (322)..(322): n is a, c, g or t
atgtcaggatttaaagcaggttttctgtggggtggggccgttgcggcgcaccagctcgaaggcggctggaaagagggcggcaagggcgtgagcgttgccgatgtcatgacggcaggcgcccacggggtaccgcgtgaaatcaccaacggcgtgctggaggggaaaaattacccaaaccacgaagccatcgacttttatcaccgctataaagaagacatcaaactctttgccgagatggggttcaaatgcttccgcacctccatcgcctggacgcgtatcttcccgaaaggcgacgagctggagccgaacgaagcgggactcnaattctatgacgatctttttgacgagtgcctgaagcacggcatcgagccggtgatcacgctttcccacttcgagatgcctttccacctggtgacggaatacggcggctggcgcaaccgtaagctgatcgacttctttgttcgcttcgcgaaggtcgtttttgagcgctaccagcataaagtgaagtactggatgacctttaacgagatcaacaaccaggccaacttccacgaagactttgcgccgtttaccaactccgggctgaaatatgcgccgggagaagatcgcgagccggtgatgttccaggcggcgcactatgagctggtggccagtgccctggcggtgaaggcggggcgcgagatcaacccgtcgctgcaaatcggctgcatgattgccatgtgccccatctatccgctgacctgtgccccggacgatatgatgatggcgatgaacgccatgcatcgtcgctactggttcaccgacgttcacgtgcgcggcaagtatccgcagcatctgctcaactactttgaacgtcgcggcttcgcgctggatatcaccgaagaagataaagtggcgctgacgcagggctgcgtggattacatcgggttcagctactacatgtctttcgccaccaaagcgacggcggacaacccgcagctggactacgacgagagcaagagcctggtctctaacccgtacgtgcagaaatcggactggggctggcagattgacccggtggggcttcgctactccctcaactggttctgggatcactaccagctgccgctgtttatcgttgagaacggctttggcgcgatcgacgtgcaggagagcgacggcacggtgaacgaccagtaccgcatcgactacctttccgcgcatatccgcgagatgaaaaaagcggtggtggaggatggcgtagacctgatgggctataccccgtggggctgtatcgacctggtctctgccggcaccggcgagatgaaaaaacgctacggctttatctttgtcgataaagataacgaaggtaacggcacgctgaaccgcagcaagaagaaatcgttcgactggtataagcaggtgattgccagcaacggagagcagctataa

SEQ ID NO: 7360 - protein, 476 aa, Enterobacter cloacae
  misc_feature (108)..(108): Xaa can be any naturally occurring amino acid
MSGFKAGFLWGGAVAAHQLEGGWKEGGKGVSVADVMTAGAHGVPREITNGVLEGKNYPNHEAIDFYHRYKEDIKLFAEMGFKCFRTSIAWTRIFPKGDELEPNEAGLXFYDDLFDECLKHGIEPVITLSHFEMPFHLVTEYGGWRNRKLIDFFVRFAKVVFERYQHKVKYWMTFNEINNQANFHEDFAPFTNSGLKYAPGEDREPVMFQAAHYELVASALAVKAGREINPSLQIGCMIAMCPIYPLTCAPDDMMMAMNAMHRRYWFTDVHVRGKYPQHLLNYFERRGFALDITEEDKVALTQGCVDYIGFSYYMSFATKATADNPQLDYDESKSLVSNPYVQKSDWGWQIDPVGLRYSLNWFWDHYQLPLFIVENGFGAIDVQESDGTVNDQYRIDYLSAHIREMKKAVVEDGVDLMGYTPWGCIDLVSAGTGEMKKRYGFIFVDKDNEGNGTLNRSKKKSFDWYKQVIASNGEQL

SEQ ID NO: 7361 - DNA, 1419 bp, Enterobacter cloacae
  misc_feature (941)..(941): n is a, c, g or t
atgatcacataccagtttatcaacgcgctttcagacgcgaagccgcaaagccatttgattgcgcgcgctgacagttccctgttaccggatagtgctcttatcgctgaaatgcgccagcagagcaccgtcgcggatgcgcgctttggctgcgcgccgtttgcccgcatcaccctgtttccggatgcgctctggcatgacgccctgaccgaagggttgctcaccgccctgcgaccgctgcttgccgcccccgccagcgccgaactcgtgctggacgtgacggatattgacgatgtggtgctggcgcaggtactgcgttttctctttaatcaggcgcacaggctcagtgacctgaagctgaagaagacggacgaagcgctgcgtcttacctgcatcactgccctctgcttgccggaacagcaggcgaagctggagacgaccttccgccagcagcagaccattgcgctcggcatggttgcggcgcgacgtctggcggatatgccgtccgaccgctgcacgccgcagtttgtggtggaagaggcgcaaaaactgtgtgccgccagccctgccctgcgctgcgaggtgttggatgaaaagcaaattgttgagcaggggctggggctactgcacgccgttggcaaaggggcgaactgcccaccgcgtctgctcgctattcactataacggcgtgtctgatggcccggtgcgctgctacgtgggaaaaggcattacctttgacaccggcggcctgtggctgaaggaaggcgcgggcatgtacaccatgaaatatgacatgtgcggcgcggctaacgtgctcgggctgatgctgaccgttgcggagctgaaattacccgtgcgcatcatgggcgtgctggcgctggcggaaaacgccatcggccccgacgccatgcagcccggcacggtggcgacggcctgcaacggcancaccgttgaaatcaacaataccgatgccgagggccggctggtactggcagacgctatcgcctgggcgagtcagcgccatccgcaggcgcactatatcattgatatggcgaccttaaccggagcggtggtgaaagcgctggggtatgagctgagcgggctgatgacccaggatgagccgttgcgtcaggcactgacgctcgcgggcaaacgaagcggcgacgaggtgtggtccctgccgctggatgcgcggctgagaaagcagaccgacagcgccattgccgatctatgcaacacgccgaccaacaatgcggcgatcagcgcctcggcggcgtggctgctgcatcacttctgcccgccgaccattccgtgggcgcatctggatatcagcgggacggcgctgtggcgtgagaacggcagaagcgtggcatcgggaagaccgattccgctgctggtggagcacttgttgggggatctttag

SEQ ID NO: 7362 - protein, 472 aa, Enterobacter cloacae
  misc_feature (314)..(314): Xaa can be any naturally occurring amino acid
MITYQFINALSDAKPQSHLIARADSSLLPDSALIAEMRQQSTVADARFGCAPFARITLFPDALWHDALTEGLLTALRPLLAAPASAELVLDVTDIDDVVLAQVLRFLFNQAHRLSDLKLKKTDEALRLTCITALCLPEQQAKLETTFRQQQTIALGMVAARRLADMPSDRCTPQFVVEEAQKLCAASPALRCEVLDEKQIVEQGLGLLHAVGKGANCPPRLLAIHYNGVSDGPVRCYVGKGITFDTGGLWLKEGAGMYTMKYDMCGAANVLGLMLTVAELKLPVRIMGVLALAENAIGPDAMQPGTVATACNGXTVEINNTDAEGRLVLADAIAWASQRHPQAHYIIDMATLTGAVVKALGYELSGLMTQDEPLRQALTLAGKRSGDEVWSLPLDARLRKQTDSAIADLCNTPTNNAAISASAAWLLHHFCPPTIPWAHLDISGTALWRENGRSVASGRPIPLLVEHLLGDL

SEQ ID NO: 7363 - DNA, 2445 bp, Enterobacter cloacae
  misc_feature (2075)..(2075): n is a, c, g or t
atgaaaatcaaagcgcctgaagcgttaatggctgccgaggtcactcgccgtgggttgatgaaaaccacggcaataggcggtctggcggttgccagcagcgcctttacgctcccttttacccgtctggcgtcggcggcggaggctctgtctcccgcttcagccccggaaaaagtggtgtggagtgcctgtaccgttaactgtggtagccgttgtcctctgcgtatgcatgttgtggacggtgaaatcaaatatgtcgaaacagacaataccggcgatgataactacgaagggttacatcaggttcgtgcctgtctgcgtggccgttcaatgcgccgtcgcgtttataacccggatcgtctgaaatacccaatgaagcgcgtcggtaagcgtggggaagggaagttcgagcgtattagctgggacgaagcctacgatattatcgcgactaacatgcagcgcctgatcaaagagtatggcaacgaatccatctacctcaactacggcaccgggacgctgggcggtaccatgacccgctcctggccgccgggtaaaatgctggtggcgcgcctgatgaactgctgcggcggctatctcaatcattacggcgactactcttccgcacagattgctgcgggtctgaactacacctacggcggctgggcagacggtaacagcccgtcggatatcgaaaacagtaaactggtggtgttgttcggtaacaacccaggcgaaacccggatgagcggcggtggggtaacctattatcttgagcaggcgcgcgccaaatccaacgcacgtatgatcatcgtcgatccgcgctataccgataccggcgcgggacgtgaagacgagtggatccctattcgccctggtaccgatgcggcgctggtcaatgcgctggcgtatgtgatgatcactgaaaacctcgtcgatcagccgttccttgataaatactgcgttggttatgacgagaagaccctgccagccagcgcaccggctaacgggcattacaaagcgtacattcttggtcagggcagcgacggggtagcgaaaacccctgagtgggcatccaccattaccggcattccagtcgagcgtattgttcagctggcccgtgaaattggttcagcaaaaccggcttatatcagccagggatggggaccacagcgtcacgcgaacggcgaaattgccacccgcgctatttctatgctctcgattctgactggcaacgttggtattcacggcggtaatagcggggcgcgtgaaggctcgtatgaagtcccgtttgaacgtatgccaacgctggataacccggttcagaccagcatctccatgtttatgtggacggacgcgatcgagcgcggcccggaaatgaccgcgctgcgtgacggtgttcggggcaaagataagctggacgtgccgatcaaaatgatctggaactacgccggtaactgcctgatcaaccagcactctgaaatcaaccgcacccatgaaattttgcaggacgacaagaagtgcgaaatgattgtggtgatcgactgccacatgacctcatcggcgaagtatgccgatattctgcttccagactgcaccgcgtctgagcagatggatttcgcgctggacgcctcctgcggcaacatgtcctatgtgatcttcactgaccaggccatcaaaccgcgcttcgagtgcaaaaccatttatgagatgacttccgagctggcgaaacgtcttggcgttgagcagcagttcactgaaggacgtactcaggaagggtggatgcgccatctgcacgagctctcacgcaaagccattcctgacctgccggacttcgataccttccgcaagcagggcatgtacaagcagcgcgatcccgaagggcatcacgtggcgtataaagccttccgcgacgatccgcaggccaatccgctgaccacgccgtcgggcaaaatcgagatctactccgaagagctggcaaaaattgctgcaacgtgggaattgccggaaggggatgttatcgatccgctgccgatttatacgccaggcttcgaaaactacaacgatccgctgacggcganattcccgcttcagttgaccggtttccactacaaagcgcgtgttcactccacctacggcaacgttgacgtactgaaagcggcctgccgacaggagatgtggatcaacccgatggatgcgaaagcgcgcggcatcagtaatggcgatcgcgtacgtatcttcaacggacgtggcgaagtgcatatcgaagctaaagtgactccgcgtatgatgcctggcgttgtcgcgctgggggaaggggcctggtataacccggatgcgaaccgtatcgatcaggcgggctgcatcaacgttctcactacgcagcgtccgtcgccgctggcgaagggcaacccatcccacacaaacctcgttcaggttgaaaaggcgtaa

SEQ ID NO: 7364 - protein, 814 aa, Enterobacter cloacae
  misc_feature (692)..(692): Xaa can be any naturally occurring amino acid
MKIKAPEALMAAEVTRRGLMKTTAIGGLAVASSAFTLPFTRLASAAEALSPASAPEKVVWSACTVNCGSRCPLRMHVVDGEIKYVETDNTGDDNYEGLHQVRACLRGRSMRRRVYNPDRLKYPMKRVGKRGEGKFERISWDEAYDIIATNMQRLIKEYGNESIYLNYGTGTLGGTMTRSWPPGKMLVARLMNCCGGYLNHYGDYSSAQIAAGLNYTYGGWADGNSPSDIENSKLVVLFGNNPGETRMSGGGVTYYLEQARAKSNARMIIVDPRYTDTGAGREDEWIPIRPGTDAALVNALAYVMITENLVDQPFLDKYCVGYDEKTLPASAPANGHYKAYILGQGSDGVAKTPEWASTITGIPVERIVQLAREIGSAKPAYISQGWGPQRHANGEIATRAISMLSILTGNVGIHGGNSGAREGSYEVPFERMPTLDNPVQTSISMFMWTDAIERGPEMTALRDGVRGKDKLDVPIKMIWNYAGNCLINQHSEINRTHEILQDDKKCEMIVVIDCHMTSSAKYADILLPDCTASEQMDFALDASCGNMSYVIFTDQAIKPRFECKTIYEMTSELAKRLGVEQQFTEGRTQEGWMRHLHELSRKAIPDLPDFDTFRKQGMYKQRDPEGHHVAYKAFRDDPQANPLTTPSGKIEIYSEELAKIAATWELPEGDVIDPLPIYTPGFENYNDPLTAXFPLQLTGFHYKARVHSTYGNVDVLKAACRQEMWINPMDAKARGISNGDRVRIFNGRGEVHIEAKVTPRMMPGVVALGEGAWYNPDANRIDQAGCINVLTTQRPSPLAKGNPSHTNLVQVEKA

SEQ ID NO: 7365 - DNA, 381 bp, Enterobacter cloacae
  misc_feature (112)..(112): n is a, c, g or t
atggctaacggcaacaaaaagcaaaaggggatgacgctgctggaggtgatggtcgctctggtgattttctccaccgccgcgctggcactgatgaactcggtctccctgaacntgcgttttacccatggcctggccgataccttgcaggccagttgggtggcggaaaaccagctggcggaggcacagctcaccagaactgacttcccggatgctgaacagcaggggacggaaatcatgggcgggcgcagctggaactggcgtaagcagcgggtgaaaaccgccgacaacgtctgggcgaataccctacgcgtatatgcggaaagcgatgagagccagccggttatctccctgcgcatcattccgccgggagagagcaagtga

SEQ ID NO: 7366 - protein, 126 aa, Enterobacter cloacae
  misc_feature (38)..(38): Xaa can be any naturally occurring amino acid
MANGNKKQKGMTLLEVMVALVIFSTAALALMNSVSLNXRFTHGLADTLQASWVAENQLAEAQLTRTDFPDAEQQGTEIMGGRSWNWRKQRVKTADNVWANTLRVYAESDESQPVISLRIIPPGESK

SEQ ID NO: 7367 - DNA, 843 bp, Enterobacter cloacae
  misc_feature (803)..(803): n is a, c, g or t
atgtcttacgaaaatcatcaggcgttaacgggcttaacgctgggtaaatcgaccgattaccgcgacacctacgatgcaagcctgttgcagggcgtgccgcgcagtctgaaccgcgatccgctcgggctgcacgctgacgcgctgccgtttgtcggcggcgacatctggacgctgtacgaactctcctggctgaatgcgcgcggtctgccgcaggtggccgtgggccacgtcgagctggattacgccagcgtaaacctggtcgaatccaagagctttaagctctatctcaacagctttaaccagaccaaattcaacagctgggacgaggtgcaacagacgcttgagcgtgatttaagcgcgtgcgcgcaggggaacgtaaccgtctcgttataccatctgcatgagctggaaggacagcctgtcgcccatttccacggcacctgcatcgacgatcaggacattgaggtggaaagctatgaatttagcaccgactacctggaaaatgcggcgggcggaaaagtggtcaacgagacgctggtcagccatctgctgaaatccaactgccttatcacccatcagccggactggggctcggtacagatccagtaccgcggcccgcagattgaccgtgaaaagctgctgcgttacctggtgtcattccgtcatcacaacgaattccacgagcagtgcgtggagcgcatcttcaacgacatccagcgtttctgccagcccgaaaagctgagcgtttacgcccgctacacccgtcgcggcggtctggatatcaatccgtggcgcaccaatancgattttgtgcctgccaccggacggctggtgcgccagtaa

SEQ ID NO: 7368 - protein, 280 aa, Enterobacter cloacae
  misc_feature (268)..(268): Xaa can be any naturally occurring amino acid
MSYENHQALTGLTLGKSTDYRDTYDASLLQGVPRSLNRDPLGLHADALPFVGGDIWTLYELSWLNARGLPQVAVGHVELDYASVNLVESKSFKLYLNSFNQTKFNSWDEVQQTLERDLSACAQGNVTVSLYHLHELEGQPVAHFHGTCIDDQDIEVESYEFSTDYLENAAGGKVVNETLVSHLLKSNCLITHQPDWGSVQIQYRGPQIDREKLLRYLVSFRHHNEFHEQCVERIFNDIQRFCQPEKLSVYARYTRRGGLDINPWRTNXDFVPATGRLVRQ

SEQ ID NO: 7369 - DNA, 351 bp, Enterobacter hormaechei
  misc_feature (181)..(181): n is a, c, g or t
atgcacgaaattaccctctgccagcgggcactggaacttatcgaacagcaggcagtgcaaaaccacgcgaaacgcgtcaccggcgtctggctgaaggtcggggcgttttcctgcgtcgagaccagcgccctcaccttctgttttgagctggtatgccgcggcacgctggcggaaggctgcnagctgcatattgaagagcagcaggcagagtgctggtgcgagcagtgtcaggagtacgtcacgctgctgtcatcgaaggtgcagcgctgtccgcagtgccagagcagcgggctgcgcatcgtggcggatgacggtatgcagatccaacgcctcgaaatcgagaaggagtaa

SEQ ID NO: 7370 - protein, 116 aa, Enterobacter hormaechei
  misc_feature (61)..(61): Xaa can be any naturally occurring amino acid
MHEITLCQRALELIEQQAVQNHAKRVTGVWLKVGAFSCVETSALTFCFELVCRGTLAEGCXLHIEEQQAECWCEQCQEYVTLLSSKVQRCPQCQSSGLRIVADDGMQIQRLEIEKE

SEQ ID NO: 7371 - DNA, 2628 bp, Citrobacter koseri
  misc_feature (1464)..(1464): n is a, c, g or t
atgagcaagagcaccgctgagatccgtcaggcgtttctcgattttttccatagtaagggacaccaggttgttgccagcagctccctggtaccgaacaatgacccgactctgctgtttaccaacgccgggatgaaccagttcaaggatgtgttccttggtctcgacaagcgtaattattcccgcgccacaacctcacagcgttgcgtgcgtgcgggcggtaaacacaacgatctggaaaacgtcggttacaccgcgcgccaccacaccttcttcgaaatgctgggtaacttcagcttcggcgactatttcaaacacgacgccattcaatacgcgtgggaactgctgaccggtgaaaactggttcaatctgccgaaagagcgtctgtgggtgaccgtgtatgagaccgatgacgaagcgttcgacatctgggaaaaagaagtgggtatcccgcgcgaacgtatcatccgtatcggtgacaacaaaggcgcgccttacgcgtctgataacttctggcagatgggcgacaccggcccttgcggtccgtgcaccgagatcttctacgatcatggcgaccacatctggggtggccctccgggaagcgcggaagaagatggcgatcgctacattgagatctggaacatcgtcttcatgcagttcaaccgtcaggccgacggcaccatggagccgctgccaaaaccgtccgtagataccggtatgggccttgagcgtatcgtggccgttctgcaacacgttaactccaactatgagattgacctgttcagcaccctgatcaaagccgttgctgaggtaacgggcgcaaccgatctgagcaacaaatcactgcgcgttatcgcagaccatattcgttcctgtgcgttcctgattgctgacggtgttatcccgtcgaatgaaaaccgtggctatgtgctgcgtcgtatcattcgtcgtgcgatccgccatggcaacatgctgggcgcgaaggacaccttcttctataaactcgttgggccactgattggcgtgatgggctctgccggtgacgagctgaaacgccagcaggcgcaggttgaacaggttctgaaaaccgaagaagagcagtttgcccgtacgctggaacgcggtctggcgctgctggacgacgagctggcgaaactcaagggcgacacgctggatggagaaaccgctttccgcctgtacgacacctacggcttcccggttgacctgaccgcggacgtttgccgcgagcgcaacatcaaagttgacgaagcaggctttgaagccgcaatggaagaacagcgtcgtcgtgcgcgtgaatccagcggttttggcgcggactacaacgcgatgatccgcgttgatagcgcgtctgaatttaaaggctacgaagagctggccctgaccagcaacgtgaccgcgctgtttgttgacggtaaagccgtagacagcattagcgcgggccaggangcggttgttatcctggataaaacgccgttctatgcggaatcgggcggtcaggttggcgataaaggcgaactgaaaggcaatggcttcagcttcagcgtaagcgatacccagaaatacggtcaggcgattggtcaccagggcaaactggtttccggctctctgaaagtgggcgagggcgttcaggccaacgttgacgaagctcgccgcgcgcgcattcgtctgaaccactcggcaacccacctgatgcacgcagccctgcgcgaagtgctgggtacgcacgttgcacagaaaggttctctggttaatgacaaagtgctgcgtttcgacttctcgcattttgaagcgatgaagccgtctgaaattcgtgcggtggaagacctggtgaatgcccagatccgtcgtaacctgccaatcgaaacccacatcatggatcttgaggcagcgaagaagaaaggtgcgatggcgctgtttggcgagaaatatgacgaccgcgttcgcgtgctgagcatgggcgacttctctaccgaactgtgtggcggtactcacgcatcccgcaccggtgacatcggcttgttccgcatcgtttccgagtcggggacggcggcaggcgtgcgtcgtattgaggcggtgaccggggaaggcgcgattgccagcctgcatgcgcagagcgaccagctgcacgagatcgcgcagctgctgaaaggcgatagtcagaacctgggcgaaaaagtgcgtgtcgcgctggatcgtacccgtcagctggaaaaagaactccagcagctgaaagaacaggctgcggcgcaggagagcgcaaacctctccagcaaagcggtagacattaagggcgtcaaactgctggtcagcgatctggcgggcgttgagcctaagatgctgcgtaccatggtcgacgatctgaagaaccagcttggttcgacggttatcgtgctggcaacggtcgcagagggtaaggtttctctgattgcgggcgtctctaaggatgtgacggatcgtgttaaagcaggggaactgattggcatggtcgcccagcaggtgggtggcaaaggtggcggtcgtccggacatggcgcaagccggtggtacggatgcggcggcacttcccgcggcattagccagcgttgaaagctgggtaagcgcgaaactgtaa

SEQ ID NO: 7372 - protein, 875 aa, Citrobacter koseri
  misc_feature (488)..(488): Xaa can be any naturally occurring amino acid
MSKSTAEIRQAFLDFFHSKGHQVVASSSLVPNNDPTLLFTNAGMNQFKDVFLGLDKRNYSRATTSQRCVRAGGKHNDLENVGYTARHHTFFEMLGNFSFGDYFKHDAIQYAWELLTGENWFNLPKERLWVTVYETDDEAFDIWEKEVGIPRERIIRIGDNKGAPYASDNFWQMGDTGPCGPCTEIFYDHGDHIWGGPPGSAEEDGDRYIEIWNIVFMQFNRQADGTMEPLPKPSVDTGMGLERIVAVLQHVNSNYEIDLFSTLIKAVAEVTGATDLSNKSLRVIADHIRSCAFLIADGVIPSNENRGYVLRRIIRRAIRHGNMLGAKDTFFYKLVGPLIGVMGSAGDELKRQQAQVEQVLKTEEEQFARTLERGLALLDDELAKLKGDTLDGETAFRLYDTYGFPVDLTADVCRERNIKVDEAGFEAAMEEQRRRARESSGFGADYNAMIRVDSASEFKGYEELALTSNVTALFVDGKAVDSISAGQXAVVILDKTPFYAESGGQVGDKGELKGNGFSFSVSDTQKYGQAIGHQGKLVSGSLKVGEGVQANVDEARRARIRLNHSATHLMHAALREVLGTHVAQKGSLVNDKVLRFDFSHFEAMKPSEIRAVEDLVNAQIRRNLPIETHIMDLEAAKKKGAMALFGEKYDDRVRVLSMGDFSTELCGGTHASRTGDIGLFRIVSESGTAAGVRRIEAVTGEGAIASLHAQSDQLHEIAQLLKGDSQNLGEKVRVALDRTRQLEKELQQLKEQAAAQESANLSSKAVDIKGVKLLVSDLAGVEPKMLRTMVDDLKNQLGSTVIVLATVAEGKVSLIAGVSKDVTDRVKAGELIGMVAQQVGGKGGGRPDMAQAGGTDAAALPAALASVESWVSAKL

SEQ ID NO: 7373 - DNA, 960 bp, Enterobacter cloacae
  misc_feature (418)..(418): n is a, c, g or t
atgaaactgtcacgcgtaagtgccgttaactggaacaaaattcaggatgataaagacctggaggtctggaaccgcctgaccagcaacttctggctgccggaaaaggtcccgctctccaacgatattccggcctggcaaaccctgagccatgccgaacagcagctgacaatccgcgtctttaccggcctgacgctgctggacaccattcagaataccgtgggtgcgcccgcgctgatgagtgatgcgctgaccccgcacgaagaggcggtaatgtcgaacatcagctttatggaggcggtccatgcccgctcctacagctcgattttctccaccctgtgccagaccagagacgtggacgcggcctacgcctggagtgaagagagcgcgtcattgcagcgcaaggcagatctggtgctgnaatattaccgggccgacgagccgctgaagaagaagatcgccagcgtgttcctggaatctttcctcttctattccggcttctggctgcctatgtactggtcgagccggggcaagctcaccaacaccgccgacttgattcgcctcatcatccgcgatgaagcggtacacgggtattacatcggctataagtatcagaaagggctggagaaagtcagcgcggaaaaacgcgaggaactcaaaggttttgccctcgatttactgatggatctgtatgacaacgagctgagctataccgaagagctgtacgccggaacgggctgggaagaggacgtaaaagccttcctctgctacaacgccaacaaggcgctgatgaacctgggctacgaagcgttattcccaccagacatggcggaggtgaacccggcgatcctcgcggcgctgtcgcccaacgccgatgaaaaccacgacttcttttccgggtccggctcgtcgtacgtgatgggtaaagcggtggaaacgcaagacgaggactgggatttttaa

SEQ ID NO: 7374 - protein, 319 aa, Enterobacter cloacae
  misc_feature (140)..(140): Xaa can be any naturally occurring amino acid
MKLSRVSAVNWNKIQDDKDLEVWNRLTSNFWLPEKVPLSNDIPAWQTLSHAEQQLTIRVFTGLTLLDTIQNTVGAPALMSDALTPHEEAVMSNISFMEAVHARSYSSIFSTLCQTRDVDAAYAWSEESASLQRKADLVLXYYRADEPLKKKIASVFLESFLFYSGFWLPMYWSSRGKLTNTADLIRLIIRDEAVHGYYIGYKYQKGLEKVSAEKREELKGFALDLLMDLYDNELSYTEELYAGTGWEEDVKAFLCYNANKALMNLGYEALFPPDMAEVNPAILAALSPNADENHDFFSGSGSSYVMGKAVETQDEDWDF

SEQ ID NO: 7375 - DNA, 1182 bp, Enterobacter cloacae
  misc_feature (929)..(929): n is a, c, g or t
atgtctgcaaacaaactcgccagcagcgcgcagggcctgcaatcctctgccatccgtgaattattaaaacatagcaaaatggcaggcgtgatttcgctgggtggcggtattccaaatccggacctgttcgatcatgagggtttaaaaatcgctgctgatgccgtgctgtctcagcattttggcgaagcgttccagtatggcctgacggaaggcgtcccggggctgcgcgaagagatccaacgcatctgtgaaggtcgcggcatcgcctgtaaagccgatgacttggtcattacttccggctcgcaacaatcgcttgacgtgctggcgcgggcgttaattaacccgggcgatacggtcgtcgtggagcggcctacctacctcgccgcgttgcaggtctttggcctggcgcaggcgaattttgaatccgttggcaccgacggcgacggcatgaaagtggatgaacttgaagcgctggtagccaccaaaaccatcaaagcggtttatatcgtgccaacctttggtaacccgggcggcgtgacgctctccgaagcgcgtcgtaaacagctggtggaattatcgaagcgctatgacttcgtgattatcgaagacgacccgtacagcgagatcaactacaccgacgaagcgttccgcccgctgattgctcatgccaaagatatcggcaatgaggataacgtggtgtacacctccaccttctctaaaatcctcgcgccgggcacccgcgtgggctgggtgctggtgccggagtggctgaagcgcgcggtggtgaacctcaagcaaaccaccgatctgcacaccagcacgctgtcgcagctgatgacgtacgagtatctgaaaaccggtcgtctggcgaatcagattaaaatgatccgcgaagcctatcgccagaaataccagacctttgcaacggnactggaagcggagctgggcgatgtgatgtcgttccacaagccaaagggcggcatgttcctgtgggcgaaaatgaacaacggcatcaatacgacgaaatggctggaaaaaacgttgagcaacggcgtcgtgtttgtgccgggtgagttcttctactgcaacgagccggaccataccacgctgcgcatgtctttcgttaccccaacggatgagcagcttaaagaagcggttcgacgcctcaaaatttccctgtaa

SEQ ID NO: 7376 - protein, 393 aa, Enterobacter cloacae
  misc_feature (310)..(310): Xaa can be any naturally occurring amino acid
MSANKLASSAQGLQSSAIRELLKHSKMAGVISLGGGIPNPDLFDHEGLKIAADAVLSQHFGEAFQYGLTEGVPGLREEIQRICEGRGIACKADDLVITSGSQQSLDVLARALINPGDTVVVERPTYLAALQVFGLAQANFESVGTDGDGMKVDELEALVATKTIKAVYIVPTFGNPGGVTLSEARRKQLVELSKRYDFVIIEDDPYSEINYTDEAFRPLIAHAKDIGNEDNVVYTSTFSKILAPGTRVGWVLVPEWLKRAVVNLKQTTDLHTSTLSQLMTYEYLKTGRLANQIKMIREAYRQKYQTFATXLEAELGDVMSFHKPKGGMFLWAKMNNGINTTKWLEKTLSNGVVFVPGEFFYCNEPDHTTLRMSFVTPTDEQLKEAVRRLKISL

SEQ ID NO: 7377 - DNA, 2574 bp, Enterobacter cloacae
  misc_feature (1289)..(1289): n is a, c, g or t
atgcgtctggatcgtcttactaataaattccagcttgctctcgccgatgcccagtcccttgcactggggcacgacaaccaatttatcgaacctcttcatttaatgagcgccttgctgaatcaggaagggggatcggtacgtcctttattaacgtccgctggcattaatgccggccagttacgcaccgccatcgatcaggcgctgagccgtttaccgcaggtagaaggtaccggcggcgacgtgcagccgtcgcaggatctggtgcgcgtgctgaacctttgcgacaagctggcgcaaaaacgtggggacaactttatttcgtcagagctgtttgttctggcggcgcttgaatcacgcggtaccttaaccgacctgctgaaatccgccggtgcaaccaccgctaatgtgacccaggcgattgagaaaatgcgcggaggtgaaagcgtgaacgaccagggagccgaagaccaacgtcaggctttgaagaaatttacggtcgacctgaccgaacgtgccgagcagggcaaacttgacccggtgatcggccgtgacgaagaaattcgtcggactatccaggtactgcaacgtcgtaccaaaaacaacccggtgctgattggtgagcctggcgtcggtaaaaccgccatcgttgaagggctggcgcagcgtatcgttaatggcgaagtgcccgaagggctgaaaggccgtcgcgtactggcgctggatatgggcgcgctggtggccggggcgaaataccgcggtgaatttgaagagcgtctgaaaggcgtgctgaacgatctggcgaaacaggaaggtaacgtcattctgtttatcgacgaactgcacaccatggtgggggcgggtaaagctgacggcgcaatggatgccgggaacatgctgaaacctgcgctggcgcgtggtgaacttcactgcgtcggcgccactacgctggacgagtatcgtcagtacattgaaaaagatgccgcgctggagcgtcgcttccagaaggtgtttgtcgctgaaccaagcgttgaagataccatcgccattttgcgaggactgaaagagcgttatgagctgcaccatcacgtgcagatcactgacccggccatcgttgcggcggcgacgctttcgcatcgttacattgccgaccgtcagttgccggataaagccatcgaccttatcgatgaagcggcgtccagcatccgtatgcagattgactcgaaaccggaagagctggaccgactcgatcgccgcattatccagctcaagctggaacagcaggcgctgancaaagagtctgatgaagcgagtaagaaacgcctcgatatgctcaacgaagaactggacgagaaagagcgtcagtattctgagctggaagaagagtggaaagctgagaaagcctccctctctggcacccagacaatcaaggcggagctggagcaggcgaaaattgccattgagcaggcgcgtcgcgtgggggatctggcacggatgtccgagctacagtacggcaagatccctgagctggaaaaacagctagagattgccacgcagtcggaaggcaaaaccatgcgtctgttgcgtaataaagtgacggatgccgagattgccgaagtgctggcgcgctggacgggtattcctgtggctcgcatgatggaaagcgaacgtgagaaactgctgcgtatggagcaggatctgcatcagcgcgtcattggacagaacgaagcggtcgaagcggtatctaacgccattcgtcgtagccgtgcggggctgtccgatccgaatcgtccaatcggctcgttccttttcctggggccaaccggtgtcggtaaaactgagctgtgtaaagcgctggctaactttatgttcgacagcgatgacgcgatggtgcgtatcgatatgtccgagtttatggagaaacactccgtctcgcgtctggtcggtgcgcctccgggatatgtcggttatgaagagggcggttacctgacggaagcggttcgtcgtcgtccttattccgtcatcctgctggatgaagtggaaaaggctcatcctgacgtgtttaacattctgttgcaggtgctggatgatgggcgtctgacggacgggctgggaagaacggtcgacttccgtaacacggtggtgatcatgacctcgaacctgggttccgatttgattcaggaacgcttcggtgagctggattatagccatatgaaagatcttgtgctgggtgtggtcagtcaaaacttccgtccggagttcatcaaccgtattgatgaagtggtcgtgttccatccgctgggcgagaaacacatcgcgtcgattgcgcagatccagttgcagcgtctgtacaaacgtctggaagagcgtgggtatgaaatccacatttccgacgatgcgctgaaactgctgagcgagaatggttacgatcctgtttatggtgcgcgtccgttaaaacgtgctatccagcagcagatcgaaaacccgctggcacagcaaatcctctctggggagctggttccgggcaaagttattcgtctggaagccaacgacgatcgcattgtggcagtgcagtaa

SEQ ID NO: 7378 - protein, 857 aa, Enterobacter cloacae
  misc_feature (430)..(430): Xaa can be any naturally occurring amino acid
MRLDRLTNKFQLALADAQSLALGHDNQFIEPLHLMSALLNQEGGSVRPLLTSAGINAGQLRTAIDQALSRLPQVEGTGGDVQPSQDLVRVLNLCDKLAQKRGDNFISSELFVLAALESRGTLTDLLKSAGATTANVTQAIEKMRGGESVNDQGAEDQRQALKKFTVDLTERAEQGKLDPVIGRDEEIRRTIQVLQRRTKNNPVLIGEPGVGKTAIVEGLAQRIVNGEVPEGLKGRRVLALDMGALVAGAKYRGEFEERLKGVLNDLAKQEGNVILFIDELHTMVGAGKADGAMDAGNMLKPALARGELHCVGATTLDEYRQYIEKDAALERRFQKVFVAEPSVEDTIAILRGLKERYELHHHVQITDPAIVAAATLSHRYIADRQLPDKAIDLIDEAASSIRMQIDSKPEELDRLDRRIIQLKLEQQALXKESDEASKKRLDMLNEELDEKERQYSELEEEWKAEKASLSGTQTIKAELEQAKIAIEQARRVGDLARMSELQYGKIPELEKQLEIATQSEGKTMRLLRNKVTDAEIAEVLARWTGIPVARMMESEREKLLRMEQDLHQRVIGQNEAVEAVSNAIRRSRAGLSDPNRPIGSFLFLGPTGVGKTELCKALANFMFDSDDAMVRIDMSEFMEKHSVSRLVGAPPGYVGYEEGGYLTEAVRRRPYSVILLDEVEKAHPDVFNILLQVLDDGRLTDGLGRTVDFRNTVVIMTSNLGSDLIQERFGELDYSHMKDLVLGVVSQNFRPEFINRIDEVVVFHPLGEKHIASIAQIQLQRLYKRLEERGYEIHISDDALKLLSENGYDPVYGARPLKRAIQQQIENPLAQQILSGELVPGKVIRLEANDDRIVAVQ

SEQ ID NO: 7379 - DNA, 2445 bp, Enterobacter cloacae complex
  misc_feature (2021)..(2021): n is a, c, g or t
atgatgattttgagcattctcgcaaccgttgtactgctcggtgtgttgttctatcaccgtgtcagtttattcctgagtagcctgattcttctggcctggacggctgcacttggcgtcgctggcctgtggaatatctgggtccttgttcccctggccatcattttgctgccgttcaacctgacgccgatgcgtaagtcgatgatctctgcgccggtgttcaggggattccgtaaagtgatgccgccgatgtcgcgtacagagaaagaagcgattgacgccggtacgacctggtgggaaggcgatctgttccagggcaacccggactggaaaaagcttcacaactatccgcagccgcgtctgaccgccgaagaacaagcctttattgatggtccggtagaagaagcgtgccgcatggcaaacgactttgccatcactcacgaaatggccgacctgccgcctgagctgtgggcatacctgaaagagcatcgcttcttcgcgatgatcattaagaaagagtacggcggtctggaattctccgcttacgctcaggctcgcgtactgcaaaaactggcgggtgtctccgggatcctggcgatcaccgttggcgtgccaaactccttaggcccgggcgagctgttacagcattacggtacagaagagcagaaagatcactacctgccgcgtctggcgcgtggtcaggaaattccgtgcttcgcgctgaccagcccggaggcaggctccgatgccggcgcaattcctgataccggcgtggtttgcatgggcgaatggcagggccagcaggtgctgggcatgcgcctgacctggaacaaacgttatatcaccctagcacctatcgccacggtgctgggcctggcgttcaaactctctgacccggaaaaactgctgggcggtgaagaagagctgggtattacctgtgcgctgatcccaacctcgactccgggcgttgaaattggtcgccgtcacttcccgctgaacgtacccttccagaacggtccaacccgcggtcaggatatctttgttccgattgactacatcatcggtggcccgaaaatggccgggcagggctggcgtatgctggtggaatgtctgtctgtgggccgcggcattaccctgccgtcgaactcaacaggcggtctgaaatcggtggcgatggggattggggcttacgcgcatatccgccgtcagttcaaaatctccatcggcaagatggaaggtatcgaagagccgctggcgcgtattgcgggcaatgcctacgtgatggacgccgcagcctcgctgattacctacggcattatgctgggcgaaaaacccgccgtgctgtcggcgattgtgaagtatcactgtacccaccgcgcacagcagtcaattattgatgcaatggatatcgcaggcggtaaaggtatcatgctcggcgaaggcaacttcctggcgcgcggctatcagggtgcgccgattgccatcaccgtggaaggggcaaacatcctgacccgcagcatgatgatcttcggccagggtgcgattcgttgccatccgtacgtgctggaagagatggctgccgcgcagaataatgatgtggatgccttcgacaagctgctgttcaaacatatcggtcacgtcggcagcaacaaggtgcgcagcttctggctgggcctgacgcgcgggctgaccagcgcgacgccaaccggcgatgcgaccaaacgttactaccagcacctgaaccgtctgagcgccaacctggctctgctgtctgacgtttccatggcggtgctgggcggtagcctgaagcgtcgcgaacgcatctccgcccgtctgggtgatgtgctgagccagatcttcctggcctctgcggtgctgaaacgctacgacgatgaaggccgtcaggaagcggatatgccgctggtgcactggggcgttcaggatgcgatgtatcaggccgaacaggcgattgacgatctgctggcgaacttcccgaaccgcttcgtggcgggtgccctgcgcgnggtgatcttcccgaccggtcgtcatcacctggcgccgtccgacaagctggatcacaaagtggcaaaaatcctccaggtaccaagcgcaacccgctctcgtattggtcggggtcaatatctggcacctaccccgcataacccggtaggtttgctggaagaggcgctgcttgacgtgatggccgccgacccgattcaccagaagatctgcaaacagctgggcaaaaacctgccgtttacacgactggatgagctggcaaaacaggcgctggcgggtggcatcatcgacaacagcgaagctgcgattctggtgaaagccgaagagagccgtctgcgcagtattaatgtggatgatttcgaacctgaagagctggcgacacagccggtaaagctgccagagaagcaccgcaaacctgaagcggcataa

SEQ ID NO: 7380 - protein, 814 aa, Enterobacter cloacae complex
  misc_feature (674)..(674): Xaa can be any naturally occurring amino acid
MMILSILATVVLLGVLFYHRVSLFLSSLILLAWTAALGVAGLWNIWVLVPLAIILLPFNLTPMRKSMISAPVFRGFRKVMPPMSRTEKEAIDAGTTWWEGDLFQGNPDWKKLHNYPQPRLTAEEQAFIDGPVEEACRMANDFAITHEMADLPPELWAYLKEHRFFAMIIKKEYGGLEFSAYAQARVLQKLAGVSGILAITVGVPNSLGPGELLQHYGTEEQKDHYLPRLARGQEIPCFALTSPEAGSDAGAIPDTGVVCMGEWQGQQVLGMRLTWNKRYITLAPIATVLGLAFKLSDPEKLLGGEEELGITCALIPTSTPGVEIGRRHFPLNVPFQNGPTRGQDIFVPIDYIIGGPKMAGQGWRMLVECLSVGRGITLPSNSTGGLKSVAMGIGAYAHIRRQFKISIGKMEGIEEPLARIAGNAYVMDAAASLITYGIMLGEKPAVLSAIVKYHCTHRAQQSIIDAMDIAGGKGIMLGEGNFLARGYQGAPIAITVEGANILTRSMMIFGQGAIRCHPYVLEEMAAAQNNDVDAFDKLLFKHIGHVGSNKVRSFWLGLTRGLTSATPTGDATKRYYQHLNRLSANLALLSDVSMAVLGGSLKRRERISARLGDVLSQIFLASAVLKRYDDEGRQEADMPLVHWGVQDAMYQAEQAIDDLLANFPNRFVAGALRXVIFPTGRHHLAPSDKLDHKVAKILQVPSATRSRIGRGQYLAPTPHNPVGLLEEALLDVMAADPIHQKICKQLGKNLPFTRLDELAKQALAGGIIDNSEAAILVKAEESRLRSINVDDFEPEELATQPVKLPEKHRKPEAA

SEQ ID NO: 7381 - DNA, 549 bp, Enterobacter cancerogenus
  misc_feature (403)..(403): n is a, c, g or t
atgacgatacccacgcttacgacagaacgcttattacttaaaccccttgttgccgccgatgccgtccagatccagcaacgctatccgcgctgggagattgtccgctatatggtggcttcagtcccctggccctacccggaaaacggtgcagaaaattatgtcaacaacgttgcactgccagatatggccaaagggattgcgtggttctggacgattcgccgtcgcgaagcgcctgacgaactgatggggttgatttgcctgtatgacgtggaggacaacaatcggggcttctggctcgcgccggaatttcagggccagggatatatgcgcgaggcgagtattgcggccacggattactggttcaatacgctcaataaatcggtgttgcgcgcgccgaaagcgncggccaacagccgctcccgacgtatttcagacagcagcggcatgcggctcatcaggacggagaagaaagcctatgtcagcggcctgctggattcggagctgtgggaaatcacccgcgacgagtggaatgcccgtcaggtcagctga

SEQ ID NO: 7382 - protein, 182 aa, Enterobacter cancerogenus
  misc_feature (135)..(135): Xaa can be any naturally occurring amino acid
MTIPTLTTERLLLKPLVAADAVQIQQRYPRWEIVRYMVASVPWPYPENGAENYVNNVALPDMAKGIAWFWTIRRREAPDELMGLICLYDVEDNNRGFWLAPEFQGQGYMREASIAATDYWFNTLNKSVLRAPKAXANSRSRRISDSSGMRLIRTEKKAYVSGLLDSELWEITRDEWNARQVS

SEQ ID NO: 7383 - DNA, 789 bp, Enterobacter cloacae
  misc_feature (236)..(236): n is a, c, g or t
atgcaggagattgatttttatctggtagatgcgttcagcgcatcctcctttggcggcaacccggcggtggtgtgcccgctcgacgcgtggctaccggatgagacgttactgcggatggcacaacagcataaccagtcagaaaccgcgttttttgtgtgtaccaaaggggggatcgagttgcgctggttcaccacgctcaccgaggttaatctctgtggtcacgcgacgcttgccgnggcgtatgtactttttcacgaactggattatccggactcacgccttcattttgacaccgcctctggtcgcctgaccgtcagtcgtgaaggtgactggatgacgctggacttcccggcctgcccgacgcaggcacagacgccgccaccggagatgctcaccgcactcggtatcagccactacgtcgaggcgcgaaaaggccgcgcctgggtgctggtactggagagccgcgagcaggttgaagcccttaatccggatttctccgccatgacgccgggcgagcataaagtggccgtcactgcccgggacgagggggaatacgactttgtcagccgtttcttctcgccaggcgtggccgtgccggaagatcctgtcaccggctccgcgcacaccatgctgatcccgtactggagtgaacggcttggcaaaacacagatgtttgcccgccaggtttctgcccgtggtggcgacgtacgctgcgaactcaagggcgaccgcgtgcggatgggcgggcaggcggcactgtatctgaagggcacagtatttctgcgctga

SEQ ID NO: 7384 - protein, 262 aa, Enterobacter cloacae
  misc_feature (79)..(79): Xaa can be any naturally occurring amino acid
MQEIDFYLVDAFSASSFGGNPAVVCPLDAWLPDETLLRMAQQHNQSETAFFVCTKGGIELRWFTTLTEVNLCGHATLAXAYVLFHELDYPDSRLHFDTASGRLTVSREGDWMTLDFPACPTQAQTPPPEMLTALGISHYVEARKGRAWVLVLESREQVEALNPDFSAMTPGEHKVAVTARDEGEYDFVSRFFSPGVAVPEDPVTGSAHTMLIPYWSERLGKTQMFARQVSARGGDVRCELKGDRVRMGGQAALYLKGTVFLR

SEQ ID NO: 7385 - DNA, 789 bp, Enterobacter cloacae
  misc_feature (650)..(650): n is a, c, g or t
atgcaggagattgatttttatctggtagatgcgttcagcgcatcctcctttggcggcaacccggcggtggtgtgcccgctcgacgcgtggctaccggatgagacgttactgcggatggcacaacagcataaccagtcagaaaccgcgttttttgtgtgtaccaaaggggggatcgagttgcgctggttcaccacgctcaccgaggttaatctctgtggtcacgcgacgcttgccgcggcgtatgtactttttcacgaactggattatccggactcacgccttcattttgacaccgcctctggtcgcctgaccgtcagtcgtgaaggtgactggatgacgctggacttcccggcctgcccgacgcaggcacagacgccgccaccggagatgctcaccgcactcggtatcagccactacgtcgaggcgcgaaaaggccgcgcctgggtgctggtactggagagccgcgagcaggttgaagcccttaatccggatttctccgccatgacgccgggcgagcataaagtggccgtcactgcccgggacgagggggaatacgactttgtcagccgtttcttctcgccaggcgtggccgtgccggaagatcctgtcaccggctccgcgcacaccatgctgatcccgtactggagtgnacggcttggcaaaacacagatgtttgcccgccaggtttctgcccgtggtggcgacgtacgctgcgaactcaagggcgaccgcgtgcggatgggcgggcaggcggcactgtatctgaagggcacagtatttctgcgctga

SEQ ID NO: 7386 - protein, 262 aa, Enterobacter cloacae
  misc_feature (217)..(217): Xaa can be any naturally occurring amino acid
MQEIDFYLVDAFSASSFGGNPAVVCPLDAWLPDETLLRMAQQHNQSETAFFVCTKGGIELRWFTTLTEVNLCGHATLAAAYVLFHELDYPDSRLHFDTASGRLTVSREGDWMTLDFPACPTQAQTPPPEMLTALGISHYVEARKGRAWVLVLESREQVEALNPDFSAMTPGEHKVAVTARDEGEYDFVSRFFSPGVAVPEDPVTGSAHTMLIPYWSXRLGKTQMFARQVSARGGDVRCELKGDRVRMGGQAALYLKGTVFLR

SEQ ID NO: 7387 - DNA, 4029 bp, Enterobacter roggenkampii
  misc_feature (3946)..(3946): n is a, c, g or t
gtggtaatcgatctgacgaagcctgcggcggcgactattaccgtggattccgtctcgcaggataccggcctgtccgacagcgactttattaccagcgacaaccagatcagcctgaaagggacgctcggcgcggccctgggcagcggtgaccacgctcagatcagcctcgacggtggcgcaacctggactgacgtgagcgtcagcggcctgagctggacctacgttgacggccgcacgctggccgacggagactacaactatcagctgcgggtgattgacgacgcggggaatatcagcgccactaccagccaggtggtgaccattgataccgtcgcgccggacgccagcaaaacgatcgctatcgacagcatcagcgacgataccggcctgagcagcagcgactttatcaccaatgacacctccctgacgctgcacggctcgctcggcgcaacgctggccgacggcgaatatgcccagatcagcatcgacggcggggtcacctggcagaacgtgatcgtcactggcaacagctggtactacgtggacggccgcacgctgggtaaccagacctatgactactacgttcgcgtagtggatgcggcgggcaacgtgggtgccagcgctcatcagcaggtgacggtcgatacggtcgcgccggatgcggcgattacggtgaccgtggataacatcaccgtcgataccggcttcgacaataacgacttcctgaccagttcgacctcgtacacgctcaacgggacgctcggggccgaactcggggcgggtgagtatgtgcaggtgagcatggatggcggcaccacctgggtttacgccacggtaagcggcacccggtggagttataacgacacccgcaccctggccgacggcgactaccgctatcaggtgcgggttgtcgatcaggcgggcaacgttggggccaccaccacgcaggacgtgacggtggatacccaggcgccgcagtacggcatcaccattgacagcatcagcgaagataccgggcagtccgggagtgatttcatcaccatggacacctcgctgacgatcaacggctcgttgggcagcgcgctggccagcgacgagcgcgtacagatcagcctcgacggcggtaatacctggattgacactaccgtcactaaccagcgctggagctatacggatacccgcgatctggcagatggggattacacctaccaggtgcggatcatcgaccaggcgggcaacgtcggctcaacctcttcgcaggtggtaacggttgataccacgccgcctgacacggtgggaacggtggtcagctataccgacggggaaggtgaacgtacaggcacgtacggcgcatcagtcgcgacggacgatacctcgccgctgatcaacggtacgcttaaccgcgctccggaagatggcgaaatcgtgcagctttaccgggacgggatcttgctgggtcaggtcacgatgaacggcagcgcaagctggtcctatcaggacaacggcctgctcgacgggaatcacacctacattctgcgcgtcaccgacaaagccggtaactacacggaatcggatggctttgtgctgaacgtcgataccagcatcccgaccaccaccgcggcgattactgcccagaccacctcggataccacgccgattgtcagcggtacggtctccgcagacctggtgaacggtgaatatctggtggtgacggtgaacgggaaaacctacacctcccagaccggcggtgcggtggtcgtcgacccggatcacaatacctggtatctacagatcccggacagcgatgccctgagtgtggcgagttacgacgtaaccgcgcaggtgaagagtagcgcgggcaacggtaacaccaccggtacggcaaccggtagcctggtgatcgataccacctcggtgaataccgactgggcgaccactgcggggaacagcaacaactcaaccatgactctcggcatgaacagcagcgggctgtggaatatcatcgctaatggacagtcttattccagcagcgatgattcaacctatgccgggaatacgttaactaacacccgtagctactatgtggtgagccagacggcagctgactttgaccgtaacggcacgcaggatatctttgcgacggagaacacctacgcgggctctacgcaggtgatgtggacctacgatggcagcagctacaccgccagccagctggcgatgggaaccaccatctggtacggcggcgtaattgcctacgacaaaaccggcgatggctatcttgatctggcgtacggcgatgccggtatggactccctgacctacctggtgaataccaacggcgttctgtcgccggacggcaccggcggggaaggtggattctacggccagttcgattccgggcgtgaaatctccggcgtcgacctgaacaacgacggtaccgtggacatcgtgcagcacaccaaccgcagcggggcgtactcgctcaccgtgattaacaacaacgggaacggtacgctttccattggccagaacctgaccaacgtgtttgtggccaacgcctcgaataccaccacggcggcctccatgacgtgggcggactttaacggcgatggctacatggatctgtacctcggcagcagctacaacaacaacggcggggtgatttactacaacgacggtaccgggcagctttccacgaccaaaagcgcggtggaagcctctaacgccacggcgggctatctgtcggtggcggtagactggaacggtgacgggcagatggacatcatcaagctcagcacctacggcagctcacagacggcgaccctgttcaccaacaacggctacggctcaacctggacttcaagccagctggcttctgggctggccaacgtcaccggtgtcgccgcggtggactacaactgggacggtgcgcaggatctgctggtgtctcagcagaacggtaaggtggtgctggtgcagaacaatgcggagatcgctgacggtaccgcgatgcatctgcacattgtcgatagcgaaggcatcaacgcgtactacggcaatacggtcaatctgtataacgctgcgggcgtgctggtggcctcgcagatcatcaacgctcagtccggcattggctcgaacgatacctctgcgctggtgagtttctacgggctggatccgaacgaaacctactcggcggagatcgtgaagatcaccaacggcgtctcggataacgtcacctggaccggcctggacgcgggcaacggcaaagagggttatgttctcaccgccgaagcggccaccggcggccacagcggaaccatcaccggtaccgggtataacgacacctttatcgcagaggatgggacctatacctataacggctccggcggctggaatacccattccgactacgacacctggagcaataccggcggcatggacgtggtggattatcgtaatgccacctctgggataaccgttgatttgcgcctctcaacggcgcaggacaccggattcggtaccacgcggttgttgaatattgaagggattaacggctccgactatgacgacgtgatcaccggcaacagcggtgataaccagttcgaaggccggggcgggaacgacaccttcaacatcggcagcggcggtcacgatacgttgctctataagctgatcaacgcgtctgacgcgacgggcggcaacggtagcgatgtggtgaacggctttaccgtcggcacctgggaagggacggcggatacggaccgtatcgatctgcgcgacctgctttccgacagcggctataccggcaccggctcggcgagctacgtgaacggcgtggcgacgctggacagcagcgcgggcaacatcgccgactacatccgcgttgtgcaaaacggcagcaacaccgagatccaggttgacctggacgggacgggcggtcagttcncgcccaccacgctggtgacgctgaacggcgtgcagacggatctggcgacgctgttggccaatcatcaactgttaattgcgtaa

SEQ ID NO: 7388 - protein, 1342 aa, Enterobacter roggenkampii
  misc_feature (1316)..(1316): Xaa can be any naturally occurring amino acid
MVIDLTKPAAATITVDSVSQDTGLSDSDFITSDNQISLKGTLGAALGSGDHAQISLDGGATWTDVSVSGLSWTYVDGRTLADGDYNYQLRVIDDAGNISATTSQVVTIDTVAPDASKTIAIDSISDDTGLSSSDFITNDTSLTLHGSLGATLADGEYAQISIDGGVTWQNVIVTGNSWYYVDGRTLGNQTYDYYVRVVDAAGNVGASAHQQVTVDTVAPDAAITVTVDNITVDTGFDNNDFLTSSTSYTLNGTLGAELGAGEYVQVSMDGGTTWVYATVSGTRWSYNDTRTLADGDYRYQVRVVDQAGNVGATTTQDVTVDTQAPQYGITIDSISEDTGQSGSDFITMDTSLTINGSLGSALASDERVQISLDGGNTWIDTTVTNQRWSYTDTRDLADGDYTYQVRIIDQAGNVGSTSSQVVTVDTTPPDTVGTVVSYTDGEGERTGTYGASVATDDTSPLINGTLNRAPEDGEIVQLYRDGILLGQVTMNGSASWSYQDNGLLDGNHTYILRVTDKAGNYTESDGFVLNVDTSIPTTTAAITAQTTSDTTPIVSGTVSADLVNGEYLVVTVNGKTYTSQTGGAVVVDPDHNTWYLQIPDSDALSVASYDVTAQVKSSAGNGNTTGTATGSLVIDTTSVNTDWATTAGNSNNSTMTLGMNSSGLWNIIANGQSYSSSDDSTYAGNTLTNTRSYYVVSQTAADFDRNGTQDIFATENTYAGSTQVMWTYDGSSYTASQLAMGTTIWYGGVIAYDKTGDGYLDLAYGDAGMDSLTYLVNTNGVLSPDGTGGEGGFYGQFDSGREISGVDLNNDGTVDIVQHTNRSGAYSLTVINNNGNGTLSIGQNLTNVFVANASNTTTAASMTWADFNGDGYMDLYLGSSYNNNGGVIYYNDGTGQLSTTKSAVEASNATAGYLSVAVDWNGDGQMDIIKLSTYGSSQTATLFTNNGYGSTWTSSQLASGLANVTGVAAVDYNWDGAQDLLVSQQNGKVVLVQNNAEIADGTAMHLHIVDSEGINAYYGNTVNLYNAAGVLVASQIINAQSGIGSNDTSALVSFYGLDPNETYSAEIVKITNGVSDNVTWTGLDAGNGKEGYVLTAEAATGGHSGTITGTGYNDTFIAEDGTYTYNGSGGWNTHSDYDTWSNTGGMDVVDYRNATSGITVDLRLSTAQDTGFGTTRLLNIEGINGSDYDDVITGNSGDNQFEGRGGNDTFNIGSGGHDTLLYKLINASDATGGNGSDVVNGFTVGTWEGTADTDRIDLRDLLSDSGYTGTGSASYVNGVATLDSSAGNIADYIRVVQNGSNTEIQVDLDGTGGQFXPTTLVTLNGVQTDLATLLANHQLLIA

SEQ ID NO: 7389 - DNA, 498 bp, Enterobacter cloacae
  misc_feature (14)..(14): n is a, c, g or t
atgcaacgcctcgncgacatcgcgcctgcacaaatcccgcagatttgggcgctgttaagccagatccccgacccggaagtgccggtgctgaacatcaccgacttaggcatggtgcgcagcgtgaaggcgcagggggaaggctgggtcatcggcttcacgccaacctattcgggctgtccggcaacggagcatctgctgggggcgatccgcgaaaccctgaccggaaacggctttagtccggtacatattgtgctgcaactggaacccgcctggaccaccgactggatgaccgacgatgcccgcaggcgcctgcgtgaatatggcatcagcccgcctgtcggccatagctgccatgcccacgttcccgcggaggtgagttgcccgcgctgtgcgagcaccgatacctcgcttatcagtgaatttggttctacggcctgcaaagcgctctaccgctgcaatacctgccgtgagcccttcgactatttcaaatgtatttga

SEQ ID NO: 7390 - protein, 165 aa, Enterobacter cloacae
  misc_feature (5)..(5): Xaa can be any naturally occurring amino acid
MQRLXDIAPAQIPQIWALLSQIPDPEVPVLNITDLGMVRSVKAQGEGWVIGFTPTYSGCPATEHLLGAIRETLTGNGFSPVHIVLQLEPAWTTDWMTDDARRRLREYGISPPVGHSCHAHVPAEVSCPRCASTDTSLISEFGSTACKALYRCNTCREPFDYFKCI

SEQ ID NO: 7391 - DNA, 2040 bp, Enterobacter cloacae complex
  misc_feature (663)..(663): n is a, c, g or t
atgcagcagttagccagcttcttgtccggcacctggcaatcaggccggggccgcgagcgcaccatcacccacgccatcagcggggaaacgctatttgaagtcaccagcgaagggctggatatggcggccgcgcgccgttacgccattgaacacggcggggaagcgctccgcgcaatgagctttatcgagcgcgccgccatgctgaagacggtggccaaacatctgctgagccagaaggatcggttttatgccctgtcagcccagaccggcgcgacgaaggccgacagctgggtggatattgaaggcggtatcggcaccctcttcacctacgcaagcctcggcagccgtgagctgccggacgataccctgtggccggaggatgaactgatcccgctgtcgaaggaaggcggctttgcggcacgtcacgtgttaacgtcgaaatccggcgtggcggtgcatatcaacgcgttcaacttcccgtgctgggggatgctggaaaagctcgcgcccacctggcttgccgggatgcccgccatcatcaagcccgccaccgccaccgcgcaggtgactcaggcgatggtgaaagcgatcgtcgagagcggactggtgccggacggcgccatcagcctaatctgtggtggcgcgggcgatctgcttaaccancttgacagccaggacgtggtgacgtttaccgggtcggccagcaccgggcagagcctgcgcgtccacccgaatatcgtcgcgcattccattccgtttaccatggaagcagattctcttaactgctgcgtgctgggtgaggacgtgacgccggaacacccggagtttgcactgtttattcgcgaagtggtgcgcgagatgactgccaaagccgggcaaaaatgtaccgccatccgccgcatcatcgtgccggaagcgcagattgacgccgtcagccaggcgctgattgcgcggctggagaaagtagtcgtcggcgatccggcccaggaaggggtgaagatgggggccctcgtcaacggtgagcaacgtgctgacgtgcaggaaaaagtcgatcatctgcttgccgcgggctgccagatccgtctgggtggtaaagctgatttgcaggcggctggcgcattcttcccgcccaccctgctgttctgcccgcagccggacgaaaccccggccgttcacgccaccgaagcctttggccccgtcgcaaccctgatgccctgccgtaacaccgaacacgccatgcagctggcgcgggcgggcggcggcagcctggcgggaacgctggttacggcagatacccgcgtggcgcggcagtttattgccggggcagcgcgcgcccacggacgtattcagatcctcaaccaggaatcctcgaaagaatccaccggccacggttcaccgctgccacaactggtgcacggtggtccgggacgtgcgggcggcggcgaagagctgggcggcctgcgcgcggtgaagcactatcttcagcgcacggccattcagggcagcccgtccatgctcgccgcgatcggtaaacagtgggtccgtggcgcggaggtgcaggaagatcgcgttcatcccttccgtaaatacttcgaggagttacagccgggcgacagcctgctgaccccgcgtcgtaccctgacggaagcggatatcgtgaattttgcctgcctgagcggggatcatttctacgcccatatggacaaaattggcgcggcggagtcgatttttggtgagcgcgtggtacacggttatttcctgatttccgccgcagcggggctgtttgtcgatgccggggttgggccggttattgccaactacggtatggaaaacctgcgctttatcgagccggtcaagccgggcgataccattcaggtgcgcctgacctgtaaacgtaaaacgctgaagaaacagcgcactgccgaggaaaaacccaccggcgtggtggaatgggcggtggagatcttcaaccagcaccagcaggccgtggcgctctactccatcctgacgctggtggcgcgccagcagggtgacttttaa

SEQ ID NO: 7392 - protein, 679 aa, Enterobacter cloacae complex
  misc_feature (221)..(221): Xaa can be any naturally occurring amino acid
MQQLASFLSGTWQSGRGRERTITHAISGETLFEVTSEGLDMAAARRYAIEHGGEALRAMSFIERAAMLKTVAKHLLSQKDRFYALSAQTGATKADSWVDIEGGIGTLFTYASLGSRELPDDTLWPEDELIPLSKEGGFAARHVLTSKSGVAVHINAFNFPCWGMLEKLAPTWLAGMPAIIKPATATAQVTQAMVKAIVESGLVPDGAISLICGGAGDLLNXLDSQDVVTFTGSASTGQSLRVHPNIVAHSIPFTMEADSLNCCVLGEDVTPEHPEFALFIREVVREMTAKAGQKCTAIRRIIVPEAQIDAVSQALIARLEKVVVGDPAQEGVKMGALVNGEQRADVQEKVDHLLAAGCQIRLGGKADLQAAGAFFPPTLLFCPQPDETPAVHATEAFGPVATLMPCRNTEHAMQLARAGGGSLAGTLVTADTRVARQFIAGAARAHGRIQILNQESSKESTGHGSPLPQLVHGGPGRAGGGEELGGLRAVKHYLQRTAIQGSPSMLAAIGKQWVRGAEVQEDRVHPFRKYFEELQPGDSLLTPRRTLTEADIVNFACLSGDHFYAHMDKIGAAESIFGERVVHGYFLISAAAGLFVDAGVGPVIANYGMENLRFIEPVKPGDTIQVRLTCKRKTLKKQRTAEEKPTGVVEWAVEIFNQHQQAVALYSILTLVARQQGDF

SEQ ID NO: 7393 - DNA, 2274 bp, Enterobacter cloacae
  misc_feature (1601)..(1601): n is a, c, g or t
atgggaagcaattcttctttttctgcccgtagaacggcactggccatggccgttgcgctctgttgcgcctggcaatcccctgtttacgctcacggcagcgaggcgcatatggtcccgatggacaaaacgcttcaggcgtttggcgcggacgtgcagtgggatgattacgcccagatgttcaccatcgtcaaagacggtgcctttgtgaaggtcaaacccggcgcaaataccgccatcgttaacggcaaaccgctgacgctccaggtgcccgtggtgatgaagaacaataaggcgtttatcccggagacctttatcaacgatgtctttcagtccggtcttgatcagacattccaggttgaaaaaagcccccacccgttaaacgcgctgacggctgatgaaatcaaccaggccgtagccattgtgaaagcctctgcggattttaaacccaatacccgctttacccagattgcgctggcggagccagaaaaggccaaagtctgggactttgtgcttaacggcacggcggtggatgcgccccgccaggccaatatcatcatgcttgatggtaaacacatcatcgaaagccgggtggatctgaaggacaaaaagatcctccgctgggagccgatcaaagacgcgcacggcatggtgctgctggatgacttcaataccgtgcagcagatcatcaatgaaagcccggagtttgccgccgtgctgaaaaagcgcggcattaccgacccgaagaaagtgatcaccactccgcttaccgtcggcttttttgacggcaaggatgggctgaaacaggaagaccgcctgctgaaagtgatcagctatctcgacgtgggcgacggtaactactgggcgcacccgatcgaaaacctggttgcggtggtggatctcgagcagaagaaaatccagaagattgaggaaggcccggtcgtgccggttccgctcacgccgcgcccttatgatggccgcgaccgcgttgaaacggtgaaaaaaccgctggaaattatcgagccggaaggcaagaactacaccatcaccggggatagggtgcactggcagaactgggattttcatctgagcctggactcacgcgtcggcccgataatctccaccgtgacctataacgacaacggcaaaaagcgacaggtgatgtatcagggatcgctcggcggcatgattgtgccgtacggcgacccggatatcggctggtactttaaagcctatctggactccggcgattacggcatgggtaccctgacctccccgctggtgcgcggcaaggatgttccgtctaacgccgtgatgctcaacgaaaccatcccggattacaccggcgcgccaatggagatccccagggcgatcgccattttcgagcgttacgccgggccggaatataagcatcaggaattaggtaaacccaacgtcagcaccgaacgccgcgagctggtggtgcgctgggtcagcaccgtgggtaactacgattacatcttcgactgggtattccacgaaaacggcactatcggcattgatgcaggggctacgggcattgaagcggtgaaaggcgtgcagacgaaaaccatgcatgatgccancgcgaaggatgacacccgatacggaacgctgatcgaccataatattgtcggtaccacccaccagcacatctacaacttccgtctggatatggacgtggacggcatcaacaataagctggtggccatggatccggacgtcaaaccgaacaccgctggcggaccgcgcaccagcaccatgcaggttaatcagtatgatattgataccgaacagcaggcggcgcagaagtttgacccgggcaccatccgcctgctgagcaataccagcaaagagaaccgcatgggcaacccggtctcgtatcagatcatcccttacgcgggcggcacacacccggtagcgtccggcgcgaagtttgccccggacgagtggatttatcaccgcctgagctttatggataaacagctgtgggtgacgcgttaccatcccgacgagatgtacccggagggaaaatacccgaaccgttccacgcacgataccggcctcggccagtacagcaaagataacgaatcgctgaacgaccaggataacgtcatctggatgaccaccggcaccacccatgtcgcccgcgccgaggagtggccgataatgccgacggaatgggtgcacacgttactcaagccgtggaatttctttgacgagacgccaacgctcggcaagaaaaaagagcagaaataa

SEQ ID NO: 7394 - protein, 757 aa, Enterobacter cloacae
  misc_feature (534)..(534): Xaa can be any naturally occurring amino acid
MGSNSSFSARRTALAMAVALCCAWQSPVYAHGSEAHMVPMDKTLQAFGADVQWDDYAQMFTIVKDGAFVKVKPGANTAIVNGKPLTLQVPVVMKNNKAFIPETFINDVFQSGLDQTFQVEKSPHPLNALTADEINQAVAIVKASADFKPNTRFTQIALAEPEKAKVWDFVLNGTAVDAPRQANIIMLDGKHIIESRVDLKDKKILRWEPIKDAHGMVLLDDFNTVQQIINESPEFAAVLKKRGITDPKKVITTPLTVGFFDGKDGLKQEDRLLKVISYLDVGDGNYWAHPIENLVAVVDLEQKKIQKIEEGPVVPVPLTPRPYDGRDRVETVKKPLEIIEPEGKNYTITGDRVHWQNWDFHLSLDSRVGPIISTVTYNDNGKKRQVMYQGSLGGMIVPYGDPDIGWYFKAYLDSGDYGMGTLTSPLVRGKDVPSNAVMLNETIPDYTGAPMEIPRAIAIFERYAGPEYKHQELGKPNVSTERRELVVRWVSTVGNYDYIFDWVFHENGTIGIDAGATGIEAVKGVQTKTMHDAXAKDDTRYGTLIDHNIVGTTHQHIYNFRLDMDVDGINNKLVAMDPDVKPNTAGGPRTSTMQVNQYDIDTEQQAAQKFDPGTIRLLSNTSKENRMGNPVSYQIIPYAGGTHPVASGAKFAPDEWIYHRLSFMDKQLWVTRYHPDEMYPEGKYPNRSTHDTGLGQYSKDNESLNDQDNVIWMTTGTTHVARAEEWPIMPTEWVHTLLKPWNFFDETPTLGKKKEQK

SEQ ID NO: 7395 - DNA, 1323 bp, Enterobacter roggenkampii
  misc_feature (1302)..(1302): n is a, c, g or t
atgaaaaaattctcagttgttattgcaggcggcggcagtacattcacgcctggtatcgtcctgatgctgttagccaaccgtgaccgtttcccactgcgtgcgctgaagttctatgacaatgacggagcacgtcaggagatcatcgccgaggcgtgcaaaatcatccttaaggagcaggcgccggagattgaatttagttacaccaccgatcctgaagcggcctttaccgatgtggatttcgtgatggcgcatattcgcgtgggcaaataccccatgcgtgaaaaagatgaaaaaatcccgctgcgccacggcgtgttgggccaggaaacgtgcgggccgggcggcatctcctacggcatgcgctccatcggcggcgtgctggagttggtggattacatggagcagtactccccgaacgcgtggatgctgaactactccaacccggcggcgattgtcgcggaagccacgcgccgcctgcgtccgaacgcgaaaattctcaacatctgcgacatgccgatcggcattgaaggacgtatggcgcaaatcgtcggtctgaaagaccgcaaagagatgcgcgtgcgctactacggtctgaaccacttcggctggtggacgtcgattgaagatctgaacggcaacgatctgatgccgaaactgcgcgaatacgtagcgaaaaacggttatgttccgccttcggaagatgcgcatactgaagcgagctggaatgatactttcgccaaggctaaagacgtacaggcgctggatccggacaccatgccgaacacctacctgaagtattacctgttcccggactatgtggtcgcccattccaacccggagcgtacccgcgccaatgaagtgatggatcaccgtgagaagcatgtattcagttcatgccgggcgattatcgaagccggtcattcttctgccggtgaactggaaatcgacgaacatgcgtcgtacatcgtcgatctggcgaccgcgatcgcctttaatacccaggaacgcatgctgctgattgtgcctaacaatggggctatccataattttgacgccgacgcgatggtagaaattccgtgtctggtcggccacaacggaccggagccgctgaccgtgggtgatattccgcacttccagaaagggctcatgagccagcaggtggcggtggaaaaactggtggtggacgcctgggagcagcgctcgtatcagaaactatggcaggcgattaccctgtcgaaaaccgtaccgagcgcgtcggtggcgaaggcgattctggacgatctgattgaagccaacaaagantactggccggaactgcattaa

SEQ ID NO: 7396 - protein, 440 aa, Enterobacter roggenkampii
  misc_feature (434)..(434): Xaa can be any naturally occurring amino acid
MKKFSVVIAGGGSTFTPGIVLMLLANRDRFPLRALKFYDNDGARQEIIAEACKIILKEQAPEIEFSYTTDPEAAFTDVDFVMAHIRVGKYPMREKDEKIPLRHGVLGQETCGPGGISYGMRSIGGVLELVDYMEQYSPNAWMLNYSNPAAIVAEATRRLRPNAKILNICDMPIGIEGRMAQIVGLKDRKEMRVRYYGLNHFGWWTSIEDLNGNDLMPKLREYVAKNGYVPPSEDAHTEASWNDTFAKAKDVQALDPDTMPNTYLKYYLFPDYVVAHSNPERTRANEVMDHREKHVFSSCRAIIEAGHSSAGELEIDEHASYIVDLATAIAFNTQERMLLIVPNNGAIHNFDADAMVEIPCLVGHNGPEPLTVGDIPHFQKGLMSQQVAVEKLVVDAWEQRSYQKLWQAITLSKTVPSASVAKAILDDLIEANKXYWPELH

SEQ ID NO: 7397 - DNA, 1623 bp, Enterobacter roggenkampii
  misc_feature (1579)..(1579): n is a, c, g or t
atgctcagtcaaatacaacgttttggcggcgccatgttcaccccggttttgctgtttccctttgccgggatcgtggttgggatcgccatcatgcttcgcaatccgctgtttgtcggtgaggccttaaccgcgccggataatctgttcgcgcaaattgttcacatcatcgaagagggcggctgggcggtgttccgtaatatgccgctgatttttgctgtcggcttaccgattggcctggcaaagcaggcgcagggccgcgcctgtctggcggtgctgattagcttcctgacctggaactactttatcaacgcgatggggatgacctggggtcacttctttggcgtcgacttctctgctgaacccactgccggcagcgggctggcgatgattgccggaatcaaaacgcttgataccagcatcatcggggcgattatcatttccgggctcgtcaccgccatccacaaccgatttttcgacaagccgttgccggtctttctggggattttccagggcacctcgtttgtcgttatcctcgcgttcttcgtcatgatcccttgcgcctggctgacgctgctgggatggccgaaagtgcagatgggcattgagtcgttgcaggcctttctacgtaccgctggcgcgctgggcgtatgggtttataccttcctggaacgcattctgatcccaaccggattacaccactttgtctacggcccgtttatcttcggcccggctgcggtagaaggcggcattcaggtctactgggcacagcaccttcaggaattcagccagagcactgtgccgctgaaaacgctgttcccggagggcggattctcgctgcacggcaactctaaggtgtttggctcagtcggtattgcgctggctatctggcataccgcgtcgccggagaaccgcgtcaaagtggcaggtctgctgatcccggccacgcttaccgccgtgctggtgggcattaccgaaccgctggagttcaccttcctgtttatctcgccgttgctgtttgccatccacgccgtgctggccgcaacgatggcgacggtgatgtataccttcggggtggtggggaacatggggggcggtctgctggaccagttcctgccgcaaaactggatcccgatgttccataaccacgcctcgacggtattcacccagattggcatcggcctctgcttcaccgctctctatttcgtggttttcaggacgcttatcgaacgtctgaatctcaaaacgccgggccgggaagagagcgaaatcaaactctacaacaaagccgactataaggccgcgcgcgggcaaaccaccgccccggcggcagccagccagcagatcgggcaggctgctgggttcttacaggcgctcggcggcgcagcaaacatcgaaagtatcaataactgcgccacccgcttgcgtatcgccctggtggatatgacgaaaacccaaagcgacgacgtcttcaaagccctgggcgcacacggtgtggtgcggcgcggcaacggcatacaggtgattgtcggtctgcacgttcctcaggtgcgcgaccagctggaatcgctgatgaaaaccnctttaacaaacgaacaaaccactctgacagaggctatatcatga

SEQ ID NO: 7398 - protein, 540 aa, Enterobacter roggenkampii
  misc_feature (527)..(527): Xaa can be any naturally occurring amino acid
MLSQIQRFGGAMFTPVLLFPFAGIVVGIAIMLRNPLFVGEALTAPDNLFAQIVHIIEEGGWAVFRNMPLIFAVGLPIGLAKQAQGRACLAVLISFLTWNYFINAMGMTWGHFFGVDFSAEPTAGSGLAMIAGIKTLDTSIIGAIIISGLVTAIHNRFFDKPLPVFLGIFQGTSFVVILAFFVMIPCAWLTLLGWPKVQMGIESLQAFLRTAGALGVWVYTFLERILIPTGLHHFVYGPFIFGPAAVEGGIQVYWAQHLQEFSQSTVPLKTLFPEGGFSLHGNSKVFGSVGIALAIWHTASPENRVKVAGLLIPATLTAVLVGITEPLEFTFLFISPLLFAIHAVLAATMATVMYTFGVVGNMGGGLLDQFLPQNWIPMFHNHASTVFTQIGIGLCFTALYFVVFRTLIERLNLKTPGREESEIKLYNKADYKAARGQTTAPAAASQQIGQAAGFLQALGGAANIESINNCATRLRIALVDMTKTQSDDVFKALGAHGVVRRGNGIQVIVGLHVPQVRDQLESLMKTXLTNEQTTLTEAIS

SEQ ID NO: 7399 - DNA, 330 bp, Enterobacter cloacae
  misc_feature (314)..(314): n is a, c, g or t
atgagaaatgttctgattaagctggcgtcgttcagcggggttgttttactttgcgggtgttcgagcgtgatgtcgcacaccggcggtaaagaaggaacatatccggggacgcgcgccagtgccgcaatgatctctgatgatgagacaaactggggtaccaaatctctggcgattcttgatatgccgtttacggcggttgccgatacgcttctgctgccgtgggatatgttccgcaccgacagctcagtgcgttcgcgcgttgagaaaagcgagcaggaaaagctggcgaccaattccgtcatcccgcccgcagngatgcctccacgctaa

SEQ ID NO: 7400 - protein, 109 aa, Enterobacter cloacae
  misc_feature (105)..(105): Xaa can be any naturally occurring amino acid
MRNVLIKLASFSGVVLLCGCSSVMSHTGGKEGTYPGTRASAAMISDDETNWGTKSLAILDMPFTAVADTLLLPWDMFRTDSSVRSRVEKSEQEKLATNSVIPPAXMPPR

SEQ ID NO: 7401 - DNA, 330 bp, Enterobacter hormaechei
  misc_feature (28)..(28): n is a, c, g or t
atgagaaatgttctgattaagctggcgncgttcagcggggttgttttactttgcgggtgttcgagcgtgatgtcgcacaccggcggtaaagaaggaacatatccggggacgcgcgccagtgccgcaatgatctctgatgatgagacaaactggggtaccaaatctctggcgattcttgatatgccgtttacggcggttgccgatacgcttctgctgccgtgggatatgttccgcaccgacagctcagtgcgttcgcgcgttgagaaaagcgagcaggaaaagctggcgaccaattccgtcatcccgcccgcagagatgcctccacgctaa

SEQ ID NO: 7402 - protein, 109 aa, Enterobacter hormaechei
  misc_feature (10)..(10): Xaa can be any naturally occurring amino acid
MRNVLIKLAXFSGVVLLCGCSSVMSHTGGKEGTYPGTRASAAMISDDETNWGTKSLAILDMPFTAVADTLLLPWDMFRTDSSVRSRVEKSEQEKLATNSVIPPAEMPPR

SEQ ID NO: 7403 - DNA, 624 bp, Enterobacter cloacae complex
  misc_feature (109)..(109): n is a, c, g or t
atggctcaaggcacgctttatattgtttctgcccctagtggcgcgggtaaatccagcctaattcaggcactgttaaaaacccaaccgttgtacgatacgcaggtttctntttctcacaccacgcgagcaccgcgtccgggtgaagtgcacggtgaacactatttctttgtgaatcacgacgaattcagagcgatgattggcagagacgcgtttcttgaacacgcagaagttttcggtaactactacggtacttcgcgtgaaaccattgagcaggtactggcgaccggcgtgaacgtgttcctggatatcgactggcagggcgcgcagcaaattcgtaagaaaatgcctgattcgcgcagtatctttattttaccgccatcgaaagatgaactggatcgccgcctgcgtggtcgcggccaggacagcgaagaagttatcgcgaagcgtatggcgcaggcagttgcagaaatgagccattacgcggaatatgattaccttattgtgaatgatgattttgatgccgcgctgagcgatctcaaaactatccttcgcgcagaacgtctgcgtatgagccgccagaagcagcgacatgacgcattaatcaccaaactgttggcagactga

SEQ ID NO: 7404 - protein, 207 aa, Enterobacter cloacae complex
  misc_feature (37)..(37): Xaa can be any naturally occurring amino acid
MAQGTLYIVSAPSGAGKSSLIQALLKTQPLYDTQVSXSHTTRAPRPGEVHGEHYFFVNHDEFRAMIGRDAFLEHAEVFGNYYGTSRETIEQVLATGVNVFLDIDWQGAQQIRKKMPDSRSIFILPPSKDELDRRLRGRGQDSEEVIAKRMAQAVAEMSHYAEYDYLIVNDDFDAALSDLKTILRAERLRMSRQKQRHDALITKLLAD

SEQ ID NO: 7405 - DNA, 1194 bp, Enterobacter cloacae
  misc_feature (1129)..(1129): n is a, c, g or t
atgacggaacacgaaaaatcctccgccgtggttgaagagaccagggagactgtggacaccacgtcacagccagagacgacagacacaaccgttgagaagaaaaacggcagcaacaaaaccagcctcacgctgagcgtgattgccatcgcgattgcgctggccgcaggcgtgggactctacggactggtgaagaaacaaggcaccaaccagacggccaccagcgacgcgctggttaaccaaatcactgccctacagaaagcgcaggagacgcaaaaagctgagctggaaggtgtgatcaaacagcaggctgccgccctcgccgacgcgaacagcaaacgtgaagagttgaccaaacagctgagcgaagtgcaggaaaaagtcgccacaatttcgggaaccgatgccaaaacctggctactttcacaggccgattttctggtgaaactggccgggcgcaagctctggagcgatcaggatgtcaccaccgccgccgcgctgctgaaaagcgccgacgcaagcctggcggacatgaacgatccgagcctcatcaacgctcgccgcgctattacggaagatatcgccagcctgtccgcggtttctcaggtcgattacgatggtatcatccttaaggtaaatcagctctccaaccagattgataaccttcagctggccgataacaacgacgatgactccccgatggattctgacggcaccgagctgtccagctccctgagcgaatggcgtatcaacctgcaaaagagctggcagaactttatggacagctttattaccattcgccgccgtgatgaaactgccgtgccgctgctggcgccgaaccaggacgtctatctgcgtgaaaacatccgctcccgcctgctggtggctgcccaggccgtaccgcgtcaccaggaagagacctacaaacaggcgctggataacgtttcaacctgggtacgtgcttactacgataccaatgacgcaaccacgaccgcgttccttgaggatatcgacaagctgagccagcaaaacatcaccatgaacgtgccggacaagctggaaagccagccgattctggagaagctcatgcagacgcgcgtgcgtaacctgctggcccagccgggcgttccgncagagcgtccggctgaagcacctgccgccgcaccagcgcctgaaagcgcgccgcaaggagagtaa

SEQ ID NO: 7406 - protein, 397 aa, Enterobacter cloacae
  misc_feature (377)..(377): Xaa can be any naturally occurring amino acid
MTEHEKSSAVVEETRETVDTTSQPETTDTTVEKKNGSNKTSLTLSVIAIAIALAAGVGLYGLVKKQGTNQTATSDALVNQITALQKAQETQKAELEGVIKQQAAALADANSKREELTKQLSEVQEKVATISGTDAKTWLLSQADFLVKLAGRKLWSDQDVTTAAALLKSADASLADMNDPSLINARRAITEDIASLSAVSQVDYDGIILKVNQLSNQIDNLQLADNNDDDSPMDSDGTELSSSLSEWRINLQKSWQNFMDSFITIRRRDETAVPLLAPNQDVYLRENIRSRLLVAAQAVPRHQEETYKQALDNVSTWVRAYYDTNDATTTAFLEDIDKLSQQNITMNVPDKLESQPILEKLMQTRVRNLLAQPGVPXERPAEAPAAAPAPESAPQGE

SEQ ID NO: 7407 - DNA, 1089 bp, Citrobacter koseri
  misc_feature (638)..(638): n is a, c, g or t
atggagaggattacagttactctcggggaacgtagttaccctatcaccatcgcggctggtttgtttaacgacccagcttccttcttaccactgaaagcgggtgatcaggcgatgctggtcaccaacgagacgctggctccgctttatctcgaccgtgtacgtcacctgcttgagcaggcgggcgtgaaggtcgacagtgtgattctgcccgatggcgagcagtacaaaagcctgacggtactggataccgtctttaccgcacttctgcaaaaaccgcacggtcgtgatacaacactgcttgccctgggcggcggcgttgtgggcgatctgaccggttttgcagccgccagctatcagcgcggcgtgcgctttattcaaattccaaccacgttgctctcacaggtcgattcttctgtgggcggtaaaacggcggttaaccatccgctcggcaaaaacatgattggcgcgttctaccagcctgcctcggtggtggtggatctcgactgtctgaaaaccttgccagcgcgcgaactggcgtccggccttgcagaagtgatcaaatacggcattattcttgacggggaattcttcacctggctggaagagaatatggatgcgctgctgcgcctcgacgggcnggcaatggcctactgtattcgccgttgttgtgagctgaaagcagaagtcgttgccgcagatgagcgtgaaaccggcttacgtgctttactgaatctggggcatacgtttggtcatgcgatcgaagccgaaatgggctacggtaactggcttcacggtgaagctgtcgctgccggaatggttatggcggcgcgagcctctgaacgtctggggcagttcaggccggaagagacagcacgtatcatcgcgttgcttaaacgtgctggcttgccggtgagtggtccgcaggaaatgtctgcgcaggcgtaccttccccacatgatgcgcgataaaaaagtattggcaggtgagatgcgtctggtactcccgcttgcaatagggaaaagtgaagtgcgcggcggagtgccgcacgaagtcgtacttggcgctattgctgattgtcagcaggcgtaa

SEQ ID NO: 7408 - protein, 362 aa, Citrobacter koseri
  misc_feature (213)..(213): Xaa can be any naturally occurring amino acid
MERITVTLGERSYPITIAAGLFNDPASFLPLKAGDQAMLVTNETLAPLYLDRVRHLLEQAGVKVDSVILPDGEQYKSLTVLDTVFTALLQKPHGRDTTLLALGGGVVGDLTGFAAASYQRGVRFIQIPTTLLSQVDSSVGGKTAVNHPLGKNMIGAFYQPASVVVDLDCLKTLPARELASGLAEVIKYGIILDGEFFTWLEENMDALLRLDGXAMAYCIRRCCELKAEVVAADERETGLRALLNLGHTFGHAIEAEMGYGNWLHGEAVAAGMVMAARASERLGQFRPEETARIIALLKRAGLPVSGPQEMSAQAYLPHMMRDKKVLAGEMRLVLPLAIGKSEVRGGVPHEVVLGAIADCQQA

SEQ ID NO: 7409 - DNA, 216 bp, Enterobacter cloacae
  misc_feature (203)..(203): n is a, c, g or t
atgtttacttattacccggcacataccacagcagcacaacccgaactcgttaacgcgattgcgcagggtctccaggcggagcacggtgttgttaccgaagatgacattttgatggaactgaccaggtgggtggaagccacagacaatgacatcctcagtgacatctaccagcaaaccatcaactatgtggtcagcgggcaaantgcacctttgtaa

SEQ ID NO: 7410 - protein, 71 aa, Enterobacter cloacae
  misc_feature (68)..(68): Xaa can be any naturally occurring amino acid
MFTYYPAHTTAAQPELVNAIAQGLQAEHGVVTEDDILMELTRWVEATDNDILSDIYQQTINYVVSGQXAPL

SEQ ID NO: 7411 - DNA, 1062 bp, Enterobacter cloacae
  misc_feature (791)..(791): n is a, c, g or t
atgtctttacgtcatctgtgctcgccgcgcctgcgtgggtctctgctgttgggctctttactgtttgccggtacgttccaggttcatgccgctgaagagatgctgcgcaaagcggtcggcaagggcgcgtatgaaatggccgtcagccagcaggaaaacgcgctgtgggttgcgacgtcacaaagccgcaaaaccgataagggcggcgtggtctatcgtctggatccggtcacgctggaagtgacgcaggcgattcataacgatctcaagccgtttggcgccacgatcgataacgccacccagacgctgtggttcggtaacaccgtcaacagcaccgtgacggcgattgacgccaaaacgagcgaggtgaaagggcgcctggtgctggacgatcgcaagcgtagcgacacggtgaagccgcttcagccgcgccagctggtggccgatgacacgaccaatacggtgtacattaccggtatcggcaaggagagcgtgatctgggttgttgatggcgcaacgctgaagctgaaggacaccatcaccaacaccggcacgttcagcaccggtctggccctggatgcgaaggcaaaacgcctgtataccaccaatgcggacggcgagctggtgaccattgatacggcaaccaacaaaatcctcagtcgtaaaaaagtgcaggatgacggaaaagagcacttctacctgaacctgagcctggacactgccggccagcgtgcgtttgtgacggattcaaaacagccagaagtgctggtggtgaatctgaaagatggcancgtgatgcagaaaatcgccgcgccagcatcgctggccgtactgtttaacccggcgcgtaacgaagcctatgtgacgcaccgcgaggcgggcaaggtgagcgtgattgacgccaaaacctacaaagtgaccaggacctacgataccccggtttacccgaacagcctggcgctgtctgcggacggtaaaacgctgtacgtaacggtgaaacagaaatcaacccgtcagcaggaagcgacccagcctgacgatgtgattcgtatcgcgctgtga

SEQ ID NO: 7412 - protein, 353 aa, Enterobacter cloacae
  misc_feature (264)..(264): Xaa can be any naturally occurring amino acid
MSLRHLCSPRLRGSLLLGSLLFAGTFQVHAAEEMLRKAVGKGAYEMAVSQQENALWVATSQSRKTDKGGVVYRLDPVTLEVTQAIHNDLKPFGATIDNATQTLWFGNTVNSTVTAIDAKTSEVKGRLVLDDRKRSDTVKPLQPRQLVADDTTNTVYITGIGKESVIWVVDGATLKLKDTITNTGTFSTGLALDAKAKRLYTTNADGELVTIDTATNKILSRKKVQDDGKEHFYLNLSLDTAGQRAFVTDSKQPEVLVVNLKDGXVMQKIAAPASLAVLFNPARNEAYVTHREAGKVSVIDAKTYKVTRTYDTPVYPNSLALSADGKTLYVTVKQKSTRQQEATQPDDVIRIAL

SEQ ID NO: 7413 - DNA, 897 bp, Enterobacter cloacae
  misc_feature (410)..(410): n is a, c, g or t
atgattaatttgaaagcagtcataccggtagcgggtttgggcatgcatatgttgcccgccacaaaggccattcctaaagagatgctgccgatcgttgacaagccgatgattcagtacatcgtcgacgagattgttgctgcggggatcaaagaaatcgttctggtgacgcactcttcgaagaatgccgttgagaaccacttcgacacctcttatgaactcgaggcgctgcttgagcagcgtgttaagcgccagcttctggcagaagttcagtctatctgtcctcctggcgtgaccatcatgaacgtgcgtcaggcgcagccgctgggtctggggcactcaattctctgcgcgcgcccggtggtgggtgataacccgttcatcgtggttctgccggacatcattattgatancgcttccgccgatccgctgcgttacaacctggcggcaatggtcgcgcgcttcaacgagacgggccgtagtcaggtgctggcgaaacgtatgaagggcgatctctctgagtattctgtaattcagaataaagagccactggagacggaagggcaggtgagccgtatcgttgagtttatcgaaaaacccgatcagccgcagaccctggactccgacctgatggcagttggccgttatgtgctgaatgcggatatctgggctgagctggaaaaaactgagccgggcgcctgggatcgtatccagctgaccgatgcgattgctgagctggcgaagaagcagtctgttgatgccatgctgatgaccggcgatagctacgactgcggtaagaaaatcgggtatatgcaggcatttgtgaactacggtctgcgtaacctgaaggaaggggcgaagttcagaagccggattgagaagctgctggctgaagactga

SEQ ID NO: 7414 - protein, 298 aa, Enterobacter cloacae
  misc_feature (137)..(137): Xaa can be any naturally occurring amino acid
MINLKAVIPVAGLGMHMLPATKAIPKEMLPIVDKPMIQYIVDEIVAAGIKEIVLVTHSSKNAVENHFDTSYELEALLEQRVKRQLLAEVQSICPPGVTIMNVRQAQPLGLGHSILCARPVVGDNPFIVVLPDIIIDXASADPLRYNLAAMVARFNETGRSQVLAKRMKGDLSEYSVIQNKEPLETEGQVSRIVEFIEKPDQPQTLDSDLMAVGRYVLNADIWAELEKTEPGAWDRIQLTDAIAELAKKQSVDAMLMTGDSYDCGKKIGYMQAFVNYGLRNLKEGAKFRSRIEKLLAED

SEQ ID NO: 7415 - DNA, 738 bp, Enterobacter cloacae
  misc_feature (479)..(479): n is a, c, g or t
atgataattcccgctttagatttaattgacggcacggttgttcgtctccaccagggcgattacgggcagcagcgcgactacggcaacgatccgctgccgcggttacaggcttacgccgccgagggcgctgaggttttgcacctggtcgatctgaccggcgcgaaagatccgtcgaagcgccagatcccgctgcttaaaacactggtggctggcgtggacgtccccgtgcaggttggcggcggcgtgcgtacggaagccgatgttgccgccttactggacgcgagcgtggcgcgcgtggtggtcggttcgaccgctgtgaaagatcctgagacggtcaagggctggttccgccgcttcggtgcggatgcgctggtgctggcgctggatgtgcgcattgacgcgcagggtaaaaagcaggtcgcggtcagcggctggcaggaaaactccggcgtaacgctggaagagctggtcgggatgtntcttccggtagggctgaagcacgtcctgtgcacggatatttcacgcgatggtacgctcgcaggctcgaacgtctcgctgtatgaagaggtttgcgcgcgttatccgcaggtggcgtttcagtcctctggcggtatcggcgacctggcggatatcaccgctctgcgcggaaccggtgtacgcggcgtgattgtgggtcgcgcgctgctggaaggcaaatttacggtgaaggaggcgattcaatgctggcaaaacggataa

SEQ ID NO: 7416 - protein, 245 aa, Enterobacter cloacae
  misc_feature (160)..(160): Xaa can be any naturally occurring amino acid
MIIPALDLIDGTVVRLHQGDYGQQRDYGNDPLPRLQAYAAEGAEVLHLVDLTGAKDPSKRQIPLLKTLVAGVDVPVQVGGGVRTEADVAALLDASVARVVVGSTAVKDPETVKGWFRRFGADALVLALDVRIDAQGKKQVAVSGWQENSGVTLEELVGMXLPVGLKHVLCTDISRDGTLAGSNVSLYEEVCARYPQVAFQSSGGIGDLADITALRGTGVRGVIVGRALLEGKFTVKEAIQCWQNG

SEQ ID NO: 7417 - DNA, 2388 bp, Enterobacter hormaechei
  misc_feature (1720)..(1720): n is a, c, g or t
atggggatgagtgcgctccctgcaacagtggctaacgcagcgcctgataacgcagcggccacgcccgcgccaacggtgcctgtcgtcgcgcaagcgaccgatccggttgtgacggccgcgccggggcagacggaaaacgtcgtcccgaatcagccgacgacggggaatacgctgcccgccgacaacccggtggttgggcaggtcatgcctggcgtgccgggagccagtgcgccggtggttgccgaaaatacgccgtcgcgtgacgttaagctgacgtttgcccagatcgcgcctcctccgggcagcatggttctgcgcggcatcaacccaaatggcggtatcgaattcggtatgcgcagcgatgaagtcgtgtcgaaagcgatgctcaacctggaatacaccccatcgccgtcgctgctgccggtgcagtcccagcttaaggtctatctgaatgacgagctgatggacgtcctgcccgtcaccaaagagcaactgggtaagaaaaccctggctcaggtgccgattaatccgctgtttatcaccgactttaaccgcgtgcgtctggagtttgtcggccactaccgcgatgtctgtgaaaacccggccagcagcaccctgtggctggatgtcgggcgtaactcttcgcttcagatgacctatcagccgctggcgttgaaaaacgatctctccgccttcccggtgccgttcttcgacccgcgtgataaccgtccgctgaacctgccgatggtctttgccggctctcccgatgtgaccgaacagctggcggcctctatcgtggcatcctggtttggttcccgctccggctggcgtggtcaaagtttcccggtcatgtacgacaaaatgccggacaaaaacgcgatcgtgtttgccaccaacgccaaacgtccggctttcctgcgtgaccatccggaggtgaaagcgcccaccatcgagatgatcagccatccggacaatccgtacgtgaagctgttggtgatcttcggccgtgatgacaaagatctggtgcaggcggcgaaaggcattgcgcaggggaatatcctgttccgcggtaacagcgttgtggtggacgaggtgaaaccgctgctggcacgtaagccttatgatgcgccgaactgggtacgtaccgaccgggccatcacctttggcgaactgaaaacctatgaagagcaattgcagtcaaccgggcttgaaccttctcctgtcagcctgtcgctgaacctgccgccggatctctatctgctgcgcaccaacggcattgatatcaatctgaactaccgttacaccgcgccggcgaccaaagacagctcgcgcatggatatcagcctcaacaaccagttcctgcaatcgttcagcctgaccagcagccaggagacaaaccggttgatgcttcgtctgcctgtattacaggggctgctggatggcaaaaccgatgtgtcgatcccggcgctgaagctcggtgcggtgaaccagctgtggtttaacttccagtatatgaaccccatgccgggtggatcggtggaaaactgtattaccttccagccggtgcaaaaccacgtggtgattggcgatgattccacgatcgacttctcgaagtattaccactttattgcgatgccggatctgcgtgcctttgctaacgccagcttcccgttcagccgcatggcagacctctctgaatcgattgtcgtgatgccaaaancggccaacgaaggccaggttaccacgctgctggacaccatgggcaccgtcggggcgcaaaccggcttgccggctatcaacgtgacggtgacggatgacgggagccagatccagaacaaagatgccgatatcatggtcatcggcaacattccggacaagctgaaagacgagaagcgcgtcgatctgctggtgcaggcggctcagtcgtgggttaacacgccgctgcgtcagaccgagttcccgagcatcatgccggacagcggcgatcgtcaggccaatatcagggcgaccgtaagctcaacgggtccgatggccgcgattgtcggcttccagtcgccgtataacgaccagcgcagcgttatcgccctgctggcggacagccctcgcgggtatgagctactcaacacggccatgaacgacagcggtaaacgggcggcaatgttcggttccgtctcggtgatccgtgagtcgggggtaaacagcctgcgcgtgggggatgtctactacgtcggtcatctgccgtggttcgaacgcctgtggtacgccctgtctaaccacccggtgctgctggccgtgctggctgcgctcagcgttgtactgctggcgtgggtactgtggcgtctgctgcgaatcatcagccgtcgtcgtcttaacccggaccatgagtaa

SEQ ID NO: 7418 - protein, 795 aa, Enterobacter hormaechei
  misc_feature (574)..(574): Xaa can be any naturally occurring amino acid
MGMSALPATVANAAPDNAAATPAPTVPVVAQATDPVVTAAPGQTENVVPNQPTTGNTLPADNPVVGQVMPGVPGASAPVVAENTPSRDVKLTFAQIAPPPGSMVLRGINPNGGIEFGMRSDEVVSKAMLNLEYTPSPSLLPVQSQLKVYLNDELMDVLPVTKEQLGKKTLAQVPINPLFITDFNRVRLEFVGHYRDVCENPASSTLWLDVGRNSSLQMTYQPLALKNDLSAFPVPFFDPRDNRPLNLPMVFAGSPDVTEQLAASIVASWFGSRSGWRGQSFPVMYDKMPDKNAIVFATNAKRPAFLRDHPEVKAPTIEMISHPDNPYVKLLVIFGRDDKDLVQAAKGIAQGNILFRGNSVVVDEVKPLLARKPYDAPNWVRTDRAITFGELKTYEEQLQSTGLEPSPVSLSLNLPPDLYLLRTNGIDINLNYRYTAPATKDSSRMDISLNNQFLQSFSLTSSQETNRLMLRLPVLQGLLDGKTDVSIPALKLGAVNQLWFNFQYMNPMPGGSVENCITFQPVQNHVVIGDDSTIDFSKYYHFIAMPDLRAFANASFPFSRMADLSESIVVMPKXANEGQVTTLLDTMGTVGAQTGLPAINVTVTDDGSQIQNKDADIMVIGNIPDKLKDEKRVDLLVQAAQSWVNTPLRQTEFPSIMPDSGDRQANIRATVSSTGPMAAIVGFQSPYNDQRSVIALLADSPRGYELLNTAMNDSGKRAAMFGSVSVIRESGVNSLRVGDVYYVGHLPWFERLWYALSNHPVLLAVLAALSVVLLAWVLWRLLRIISRRRLNPDHE

SEQ ID NO: 7419 - DNA, 3147 bp, Enterobacter cloacae
  misc_feature (2198)..(2198): n is a, c, g or t
atgattgaatggattatccggcgctctgtcgccaaccgtttcctggtcatgatgggggccctgtttctcagcatctggggcacatggacgattattaacacgcctgtcgatgccttgcctgacctgtcagatgtgcaggtcattatcaaaaccagctatcccggccaggccccgcagattgtagaaaaccaggtcacctatccacttaccaccaccatgctgtccgtgcctggcgcaaaaaccgtgcgtggtttttcacagttcggtgattcgtatgtgtatgtcatttttgaagacggcaccgatctgtactgggcccgttcccgcgtgctggagtacctgaaccaggtacagggaaaactgcccgccggtgtgagttctgaaatcggtccggacgccacgggggtgggctggatatttgaatatgcccttgtcgatcgcagcggaaaacacgacctttcagaactgcgttctctgcaggactggttcctgaaatttgagctgaaaaccatcccgaacgtggctgaggtcgcttcggttggcggcgtggtgaaacagtaccagattcaggtcaatccggtaaaattgtctcagtatggtatcagcctgcccgaagtgaaacaggcccttgaatcgtctaaccaggaggccggtggctcatccgttgaaatggccgaagctgagtatatggtccgtgccagcggttatcttcagagcattgatgattttaataacatcgtcctgaaaacaggcgagaacggcgtgccggtttatctgcgggatgttgcccgcgtgcagaccgggcctgaaatgcggcgtggtattgccgagctgaacggccagggcgaagtcgctggcggcgtggtgatcctgcggtcgggtaaaaatgcacgcgacgttatcacggcagtgagggataaacttgagacgctgaaggccagcctgccggaaggcgttgaaatcgtgaccacctacgatcgcagccagctcatcgaccgggcgattgataacctcagttccaaacttctggaagagtttatcgtggtggccatcgtctgtgccctgttcctgtggcacgtacgttctgccctggtggcgattatctctctgccgcttggtctgtgtatcgcctttatcgtcatgcacttccagggactgaacgccaatatcatgtcgctgggagggatagcgattgccgtcggtgcgatggtggatgccgccattgtgatgattgagaatgcgcataagcggcttgaggagtgggatcatcagcatccgggtgagcagattgacaacgccacccgctggaaggtgattaccgatgcctccgttgaagtgggacccgcactgtttatcagcctgctgatcatcaccctgtcctttattcctatctttaccctggaaggtcaggaaggacgtctgtttggcccgctggcattcacgaaaacgtactccatggcgggcgcggccgcgctggccatcatcgtcattccgattctgatgggattctggatccgggggaaaattcctgcagagaccagtaaccccctgaaccgggtactgatcaaagcgtatcatccattgctgttgcgggttctccactggccaaaaacaaccctgctggttgcggccttgtccattttcaccgttatctggccgctgagccaggtgggcggtgagtttctgccgaagattaacgagggcgacctgttgtatatgccgtcgaccctgccgggtgtctctccggctgaagctgcagcgctcctgcagacgacggacaagttaatcaaaagcgttcctgaagtggcctctgtatttggcaagaccggtaaagcagagaccgccacggattccgcaccgctcgaaatggttgaaaccacgatccagctcaaacctgaggatcagtggcgtccaggcatgacgattgacaagattattgaagaactcgacaggaccgtccgtttaccggggctggcaaacctctgggtgccgccaatccgtaaccgtattgatatgctctcaaccgggatcaaaagcccgataggtatcaaggtgtccggaacggttctgtccgatatcgatgcaacggcgcagagtatcgaagcggtcgccaaaaccgtacccggcgtagtgtctgctctcgcagagcgactggaaggcgggcgctacattgatgtggatatcaaccgggaaaaagnctcccgctacggaatgacggtgggcgatgtgcagctgttcatctcatcagccatcggcggcgcgacggtaggggaaacggttgaaggcgtggcccggtacccgattaatatccgctatccgcaggattaccggaacagcccgcaggccctgaaacagatgccgatcctgaccccgatgaagcagcagatcacgctgggcgatgttgcggatattaaggtcgtttccgggccgactatgctgaaaacggaaaatgcccgtccagccagctggatttacattgacgcgcgcggcagggatatggtgtcggtggttaatgacattaaaacggcgatcagtcagaaagtgaaactgagaccgggtaccagcgtgtcattctccggacagtttgaactgcttgagcatgccaacaagaaactgaagctgatggtgccgatgacggtgatgatcatcttcatcctgttgtatctggcattccgccgggttgatgaagccctgctgatcctgatgagcctgccgttcgccctggttggcgggatatggttcctgtactggcagggcttccatatgtctgtcgcaaccggaacggggtttatcgctctggccggggtggcagcagagtttggcgtggtcatgctgatgtatctgcgtcatgccattgaagcgcacccggaattgtcccgtaaagagacgttcacaccggaaggccttgatgaagccctctatcatggtgccgtactgcgtgtccggccgaaagccatgaccgtggcggtgatcattgcgggtctgctgccaatactctggggaaccggtgcaggttcagaagtcatgagccgtatcgcggcacccatgattggtgggatgatcacggctccgctgctgtccctgttcattattcctgccgcctacaaattaatctggctgcgcagacataaaaaaagcgtgtcctga

SEQ ID NO: 7420 - protein, 1048 aa, Enterobacter cloacae
  misc_feature (733)..(733): Xaa can be any naturally occurring amino acid
MIEWIIRRSVANRFLVMMGALFLSIWGTWTIINTPVDALPDLSDVQVIIKTSYPGQAPQIVENQVTYPLTTTMLSVPGAKTVRGFSQFGDSYVYVIFEDGTDLYWARSRVLEYLNQVQGKLPAGVSSEIGPDATGVGWIFEYALVDRSGKHDLSELRSLQDWFLKFELKTIPNVAEVASVGGVVKQYQIQVNPVKLSQYGISLPEVKQALESSNQEAGGSSVEMAEAEYMVRASGYLQSIDDFNNIVLKTGENGVPVYLRDVARVQTGPEMRRGIAELNGQGEVAGGVVILRSGKNARDVITAVRDKLETLKASLPEGVEIVTTYDRSQLIDRAIDNLSSKLLEEFIVVAIVCALFLWHVRSALVAIISLPLGLCIAFIVMHFQGLNANIMSLGGIAIAVGAMVDAAIVMIENAHKRLEEWDHQHPGEQIDNATRWKVITDASVEVGPALFISLLIITLSFIPIFTLEGQEGRLFGPLAFTKTYSMAGAAALAIIVIPILMGFWIRGKIPAETSNPLNRVLIKAYHPLLLRVLHWPKTTLLVAALSIFTVIWPLSQVGGEFLPKINEGDLLYMPSTLPGVSPAEAAALLQTTDKLIKSVPEVASVFGKTGKAETATDSAPLEMVETTIQLKPEDQWRPGMTIDKIIEELDRTVRLPGLANLWVPPIRNRIDMLSTGIKSPIGIKVSGTVLSDIDATAQSIEAVAKTVPGVVSALAERLEGGRYIDVDINREKXSRYGMTVGDVQLFISSAIGGATVGETVEGVARYPINIRYPQDYRNSPQALKQMPILTPMKQQITLGDVADIKVVSGPTMLKTENARPASWIYIDARGRDMVSVVNDIKTAISQKVKLRPGTSVSFSGQFELLEHANKKLKLMVPMTVMIIFILLYLAFRRVDEALLILMSLPFALVGGIWFLYWQGFHMSVATGTGFIALAGVAAEFGVVMLMYLRHAIEAHPELSRKETFTPEGLDEALYHGAVLRVRPKAMTVAVIIAGLLPILWGTGAGSEVMSRIAAPMIGGMITAPLLSLFIIPAAYKLIWLRRHKKSVS

SEQ ID NO: 7421 - DNA, 2190 bp, Enterobacter ludwigii
  misc_feature (1335)..(1335): n is a, c, g or t
atgctctacaaaggcgacaccctgtacgtagactggctggaagatggcattgccgaactggtgttcgatgcccccggctcagtgaacaagcttgataccgcgacggtggccagtcttggccaggcgctggatgtacttgaaaagcaatcagatttaaaggggctgctgctgcgctccaacaaagcggcctttatcgttggcgcggatatcaccgaattcctgtcgctgttcctggtgcccgaagaacagctgagccagtggctgcactttgccaacagcgtttttaatcgtctggaagatctgcctgtcccgaccctttccgccgttaacggctacgcgctgggcggtggctgcgagtgcgtgctggcgaccgactaccgtctggcgacgccggacctgcgcatcggcctgccggaaaccaagctgggcatcatgccgggctttggcggttccgtgcgtatgccgcgcatgctgggtgccgacagcgcgctggagatcattgccgcgggtaaagatgtcggcgcagaacaggcgcagaaaatcggcctggtggacggcgtggttaagcctgaaaaactgattgagggtgctatcgccattctgcgtcaggcgattaacggcgatctcgactggaaagccaaacgtcagccgaaactggagccgttgaagctctgcaaaattgaagccaccatgagcttcaccatcgccaaaggcatggtgatgcagacggcgggtaaacactacccggcgccgatcacggcggtgaaaaccattgaagcggcagcccgtctgggccgtgatgacgccctgaagctggaaaaccagagctttgtcccgctggcgcacaccaacgaagcccgcgcgctggttggtatcttccttaacgatcagttcgtgaagggcaaagccaaacaacttaccaaaaacgttgaaacgccaaaacacgcggcggtactcggcgcgggcattatgggtggcggcatcgcctaccagtctgcctggaaaggcgtgccggtggtgatgaaggacatcaacgagaaatccctgacgctgggcatgaccgaagcggccaagctgctgaataaacagcttgagcgcggcaaaattgacggtctgaagctggcaggcgtgatctccaccatccagccagtgctggaatacagcggtttcgaccgtgtggacgtggtggttgaagcggtcgtcgagaacccgaaagtgaaaaaagcggtactggccgaaaccgaagacaaggtgcgtccggaaaccgtgctggcctctaacacctccaccattcctatcagcgaactggcgagcgtgctgaagcgtccggaaaanttctgcgggatgcacttctttaacccggtgcatcgcatgccgctggttgaagtgatccgtggggaaaaaacctccgacgaaaccatcgccaaagtggtggcgtgggcgagcaagatgggcaaaacgccgatcgtggttaacgactgcccgggcttcttcgttaaccgcgtgctgttcccgtacttcgccggtttcagccagctgctgcgcgacggcgcagacttccgcaaaatcgacaaggtgatggaaaaacagttcggctggccgatgggcccggcgtatctgctggacgttgtcggcatcgacactgcccatcacgcgcaggcggtgatggcgacgggcttcccgcagcgcatgcagaaagactatcgcgacgccattgacgccctgttcgacgccaaccgctttggtcagaaaaacggtctgggcttctggcgctataaagaagacagcaaaggcaaaccgaaaaaagaagaagatccggcggtggatggcctgctggccgacgtcagtcagccgaaacgcgacttcaccgacgatgagatcatcgcccggatgatgatcccgatgatcaacgaagtggtgcgctgcctcgaagaaggcattatcgccagcccggcagaagcggatatggcgctggtatacggcctcggcttccctccgttccacggcggcgcgttccgctggctggatacgctcggcagcgcccgctatctcgatatggcacagcagtaccagcacctcggtccgctttatgaggtgccggaagggctgcgtaacaaagcgcgccataacgaaccctactatccagcagttgagccagcccgtccggttggcgcactgaaaacggcttaa

SEQ ID NO: 7422 - protein, 729 aa, Enterobacter ludwigii
  misc_feature (445)..(445): Xaa can be any naturally occurring amino acid
MLYKGDTLYVDWLEDGIAELVFDAPGSVNKLDTATVASLGQALDVLEKQSDLKGLLLRSNKAAFIVGADITEFLSLFLVPEEQLSQWLHFANSVFNRLEDLPVPTLSAVNGYALGGGCECVLATDYRLATPDLRIGLPETKLGIMPGFGGSVRMPRMLGADSALEIIAAGKDVGAEQAQKIGLVDGVVKPEKLIEGAIAILRQAINGDLDWKAKRQPKLEPLKLCKIEATMSFTIAKGMVMQTAGKHYPAPITAVKTIEAAARLGRDDALKLENQSFVPLAHTNEARALVGIFLNDQFVKGKAKQLTKNVETPKHAAVLGAGIMGGGIAYQSAWKGVPVVMKDINEKSLTLGMTEAAKLLNKQLERGKIDGLKLAGVISTIQPVLEYSGFDRVDVVVEAVVENPKVKKAVLAETEDKVRPETVLASNTSTIPISELASVLKRPEXFCGMHFFNPVHRMPLVEVIRGEKTSDETIAKVVAWASKMGKTPIVVNDCPGFFVNRVLFPYFAGFSQLLRDGADFRKIDKVMEKQFGWPMGPAYLLDVVGIDTAHHAQAVMATGFPQRMQKDYRDAIDALFDANRFGQKNGLGFWRYKEDSKGKPKKEEDPAVDGLLADVSQPKRDFTDDEIIARMMIPMINEVVRCLEEGIIASPAEADMALVYGLGFPPFHGGAFRWLDTLGSARYLDMAQQYQHLGPLYEVPEGLRNKARHNEPYYPAVEPARPVGALKTA

SEQ ID NO: 7423 - DNA, 1188 bp, Enterobacter cloacae
  misc_feature (1114)..(1114): n is a, c, g or t
atgattatttcagcagccagtgattatcgcgccgcggcgcagcgcattttgcccccgttcctgttccactacattgacggcggggcgtatgccgaatacaccctgcgccgcaacgtggaagacctgtcggaggtggccctgcgccagcgcgtgctgaagaatatgtctgacctgagccttgagacgaagctgtttaacgaaacgctctccatgccggtagcgctcgcacctgtcggtttatgcggcatgtatgcccgtcgcggtgaagtgcaggccgccgccgccgcagatgccaaaggcattccgtttaccctttccaccgtgtccgtctgcccgattgaagaagtcgccccaactatcaagcgcccgatgtggttccagctgtacgtcctgcgcgatcgcggttttatgcgcaacgcactggagcgcgccaaagcggcgggctgctcaacgctggtctttaccgtcgacatgccgacccccggcgcgcgctaccgcgacgcccactccggcatgagcggccctaacgcggccctgcgccgttactggcaggcggtgacgcacccgcagtgggcgtgggatgtgggcgtgaacggccgtccgcacgatctgggcaatatttcggcctacctgggtaaaccgaccgggctggaggattacatcggctggctggcgaacaatttcgatccgtcgatctcatggaaagacctggagtggatccgcgaattctgggacggcccgatggtgatcaaagggatcctcgacccggaagatgcccgcgacgcggtacgttttggcgccgatgggatcgtggtctctaaccatggtggccgccagcttgacggggtgctctcctccgcccgcgccctgccggccattgccgatgcggtgaaaggcgatattgcgatcctggccgacagcggcatccgtaacgggctggacgtggtgcgcatgatcgccctgggcgcggacagcgtgctgctgggccgtgcttacctgtacgcgctggccaccagcggccaggcgggcgtggcgaatctgctgaacctgatcgagaaagagatgaaggtggcgatgacgctgaccggtgcgaaaacaatcggtgaaatcagcnaagactctctggtgcaggagctcagtaagctgcctgcggcgctggcccctctttctcagggaaacgcggcctga

SEQ ID NO: 7424 - protein, 395 aa, Enterobacter cloacae
  misc_feature (372)..(372): Xaa can be any naturally occurring amino acid
MIISAASDYRAAAQRILPPFLFHYIDGGAYAEYTLRRNVEDLSEVALRQRVLKNMSDLSLETKLFNETLSMPVALAPVGLCGMYARRGEVQAAAAADAKGIPFTLSTVSVCPIEEVAPTIKRPMWFQLYVLRDRGFMRNALERAKAAGCSTLVFTVDMPTPGARYRDAHSGMSGPNAALRRYWQAVTHPQWAWDVGVNGRPHDLGNISAYLGKPTGLEDYIGWLANNFDPSISWKDLEWIREFWDGPMVIKGILDPEDARDAVRFGADGIVVSNHGGRQLDGVLSSARALPAIADAVKGDIAILADSGIRNGLDVVRMIALGADSVLLGRAYLYALATSGQAGVANLLNLIEKEMKVAMTLTGAKTIGEISXDSLVQELSKLPAALAPLSQGNAA

SEQ ID NO: 7425 - DNA, 459 bp, Enterobacter cloacae
  misc_feature (11)..(11): n is a, c, g or t
atggaaaaganattaccgcgcatcaaagcgctgttaacccccggtgaagtggctaagcgaagcggtgcggcggtgtcggcgctccacttctatgaaagcaaagggttaataaaaagtatccgtaacgccggaaaccagcggcgctatacccgcgatgtgctccgctacgtggcgatcatcaaaattgcgcaacgtatcggcattcctctggccaccatcggtgacgcgttcggcgtattgccggaagggcactcgctgagcgcgaaggagtggaagcagctgtcgtcccagtggcgagaagagctggatcgtcgtattcacacgctggtggccctgcgcgatgagctggacggctgcattggttgcgggtgtttatcacgcagcgattgtccgctacgtaacccgggtgacaggctgggcgagcagggaacgggggcgcggttgctggaggaggattga

SEQ ID NO: 7426 - protein, 152 aa, Enterobacter cloacae
  misc_feature (4)..(4): Xaa can be any naturally occurring amino acid
MEKXLPRIKALLTPGEVAKRSGAAVSALHFYESKGLIKSIRNAGNQRRYTRDVLRYVAIIKIAQRIGIPLATIGDAFGVLPEGHSLSAKEWKQLSSQWREELDRRIHTLVALRDELDGCIGCGCLSRSDCPLRNPGDRLGEQGTGARLLEED

SEQ ID NO: 7427 - DNA, 1305 bp, Citrobacter rodentium
  misc_feature (181)..(181): n is a, c, g or t
atgaaaacccgtacccaacagatcgaagagttacaaaaagagtggacccaaccgcgctgggaaggcattcgccgtccgtacagcgcagaggaagtggtgaagttacgcggctcggttaacccggaatgtacgctggcgcagaacggcgcggcgaaaatgtgggatctgctgcatggggggnctaaaaaaggctatatcaacagcctcggcgcgctgaccggcggtcaggcattgcagcaggcgaaggccggcattgaggctatctatctttccggctggcaggtcgcggcggatgctaaccttgcctccagcatgtatccggatcaatctctttatccggcgaactcggtgccgtcagtggtggatcggatcaacaataccttccgccgtgcggatcagatccagtgggccgcgggtatcgaaccccacgatccgcgttttatcgactatttcctgccgatcgtcgccgatgcggaagccggtttcggcggcgtgctgaacgcctttgagctgatgaaatccatgattgaggccggtgcagcggccgttcactttgaagatcagctggcgtcggtgaagaagtgcgggcatatgggcgggaaagtgctggtgccaacccaggaagcgatccagaagctggttgccgcgcgtctggctgctgacgtgctcggcgtgccgacgctggtgattgcccgtaccgatgctgacgcggcggacctgatcacctctgactgcgacccgtatgacagcgaattcattaccggcgaacgtaccagcgaagggttctatcgcacacatgccggtattgaacaggcgatcagccgcggcctggcgtatgccccttacgccgacctggtctggtgtgaaacctccacgccggatctggcgctggcgaagcgctttgccgatgcgattcatgcgaagtatccgggcaagctgctggcctataactgttcgccgtccttcaactggcaaaagaatctggacgatacgaccatcgccagcttccagcagcaattgtcagatatgggctacaagtaccagttcatcaccctggcgggtatccacagcatgtggttcaacatgttcgacctggcgcacgcctacgcgcagggcgaaggcatgaagcactacgttgagaaggtacagcagccagaatttgcggcgggcaaagagggatataccttcgtttcgcaccagcaggaagtggggaccggctacttcgataatgtgaccacgattattcagggcgggacctcctccgtcacggcattaacgggctcaacggaagaagcacagttctaa

SEQ ID NO: 7428 - protein, 434 aa, Citrobacter rodentium
  misc_feature (61)..(61): Xaa can be any naturally occurring amino acid
MKTRTQQIEELQKEWTQPRWEGIRRPYSAEEVVKLRGSVNPECTLAQNGAAKMWDLLHGGXKKGYINSLGALTGGQALQQAKAGIEAIYLSGWQVAADANLASSMYPDQSLYPANSVPSVVDRINNTFRRADQIQWAAGIEPHDPRFIDYFLPIVADAEAGFGGVLNAFELMKSMIEAGAAAVHFEDQLASVKKCGHMGGKVLVPTQEAIQKLVAARLAADVLGVPTLVIARTDADAADLITSDCDPYDSEFITGERTSEGFYRTHAGIEQAISRGLAYAPYADLVWCETSTPDLALAKRFADAIHAKYPGKLLAYNCSPSFNWQKNLDDTTIASFQQQLSDMGYKYQFITLAGIHSMWFNMFDLAHAYAQGEGMKHYVEKVQQPEFAAGKEGYTFVSHQQEVGTGYFDNVTTIIQGGTSSVTALTGSTEEAQF

SEQ ID NO: 7429 - DNA, 1248 bp, Enterobacter cloacae
  misc_feature (736)..(736): n is a, c, g or t
atgagtggactcaggcaggagttggggctggcgcagggcattggcttactctcaacgtctttattaggcacgggggtatttgcggttcccgcgctggcggcattggttgccggcaataacagtctttgggcatggccggtgctgatcgtgctggtgtttccggtggcgattgtctttgccatactcgggcggcacttcccgagcgcaggcggcgtagcgcattttgtcggcatggcgtttgggccgcggatggagcgcgtcaccggctggctatttttgtcggtgatacccgttggccttccggcagccctgcatatcgcaaccggcttcggacaggcgctgtttggctggcacgatgaacagctgctgctggctgaactcggtacgctggcgattgtctggtgggtaggctcacgcggggccagctccagcgccaatctgcaaacgctggtcgccgtgttaattgtcgcgctgatcgtcgccatctggtttgcgggtgacattaccgtggcggatattcctttccccgcgattaacgacatcgaccacgcacagcttttcgctgcactatccgtcatgttctggtgtttcgtcggtctggaggcgttcgctcatctggcatccgagtttaaacagcccgagcgtgatttcccccgcgcactgatgattggcctgctgctggcgggtaccgtgtactgggcctgtaccgtactggtgctgcacttcaacgcgttcngtgaagagaaagctgccgccgcgtcgctgccgggcatcgtggtgcagctgtttggcgttaaggccctgtgggtagcctgcgtgattggctatctcgcctgctttgccagcctcaacatctatattcagagcttcgcccggctggtgtggtctcaggcactttataaaccggatagccccctctcacgcctgtcaaagcgtcagcttccggtgaatgcgctgaataccgtactgggctgctgcgtggtgagttccctggccatttatctcctcgacatcaaccttgacgcgctgattgtctacgccaacggtattttcatcatgatctacctgctgtgcatgctggcgggctgtcggttgctgaaaggacgctttaaggcgctggcggctgtcgggtgtgtcctgtgcctgatgctgctggcgatggtgggatggaagagtgtgtacgccatcgtcatgctggcggggctgtgggtgtttttaccgaagcggcaaaagccgcaggcccggtga

SEQ ID NO: 7430 - protein, 415 aa, Enterobacter cloacae
  misc_feature (246)..(246): Xaa can be any naturally occurring amino acid
MSGLRQELGLAQGIGLLSTSLLGTGVFAVPALAALVAGNNSLWAWPVLIVLVFPVAIVFAILGRHFPSAGGVAHFVGMAFGPRMERVTGWLFLSVIPVGLPAALHIATGFGQALFGWHDEQLLLAELGTLAIVWWVGSRGASSSANLQTLVAVLIVALIVAIWFAGDITVADIPFPAINDIDHAQLFAALSVMFWCFVGLEAFAHLASEFKQPERDFPRALMIGLLLAGTVYWACTVLVLHFNAFXEEKAAAASLPGIVVQLFGVKALWVACVIGYLACFASLNIYIQSFARLVWSQALYKPDSPLSRLSKRQLPVNALNTVLGCCVVSSLAIYLLDINLDALIVYANGIFIMIYLLCMLAGCRLLKGRFKALAAVGCVLCLMLLAMVGWKSVYAIVMLAGLWVFLPKRQKPQAR

SEQ ID NO: 7431 - DNA, 2664 bp, Enterobacter cloacae
  misc_feature (971)..(971): n is a, c, g or t
atgagccagagagggttagaagcgctactccgtccgaaatccattgccgttattggcgcctcgatgaaaccggaccgcgcagggtgtctgatgatgcgtaacctgctggctggcgggtttaacggcccggtcatgcccgttacgcccgcttataaggcggtacagggggtactggcgtggccggatgtgcagagcctgcctttcgttcccgacctcgccgtgctctgtacgcatgcgaaacgaaacctcgaactgcttgagtcgctcggtcagaaaggctgtaaaacctgcattattctttcctcgcctcctgaacagcagcccgaactgctggcctgcgccagccgctaccagatgcgcattcttggtccaaacagcctcggtctgcttgcgccctggcaagggctgaatgccagtttttccccggttccgatccgcaaaggcaaactggcctttatttcgcagtcggctgcggtatccaataccatcctcgactgggcgcagcagcgtgagatgggcttttcctacttcatcgctttgggcgacagcctggacattgacgtcgatgagctgctggatttcctggcgcgtgacagcaaaaccagcgctatcctgctctaccttgaacacctgagcgacgcccgtcgttttgtgtcggcgtcgcgtagcgcatcgcgaaataaaccgatactggtcatcaaaagcgggcgcagccccgcggctcagcgcctgctacattcccgttccgggatggatcccgcatgggatgcagcgatccagcgcgccggtttactgcgggtacaggatacgcacgagcttttttccgccgtcgaaacgttaagccacatgcgccccctgcgcggtgaaaagttgatgattgtcagcaacggtgccgctcccgccgccctggcgctggacgagctctggctacgcaacggcaagctggccactctgggtgaagagacgctacngcgcctgcgggacgcgttaccgggaagcgttgttcccggtaatcccctcgatttgcgcgatgatgccagcagcgatcgttacattaaggcgatcacgattttgctcgatagccaggactttgatgcactgatgattatccattcgcccagcgcggttgcgccaggcagcgaaagtgcgcgtgcgctgattgaggcagtccgaaaacatccccgcggcaaatacgttaccctgctgaccaactggtgcggcgagttctcctcccaggaggcacggcgtctgtttagtgaagccgggttgccaacctaccgtaccccggagggcaccattaccgcgtttatgcatatggttgaataccgccgcaaccagaagcagctgcgtgaaacgcctgccctgccgggcaatctcaccgcaaattcagtggatgtgcacaggcttttgcagcaggccatcgaagagggcgccacttctcttgatacacatgaggtacaacccattcttggcagctatgggatgcaaaccctgcccacctggattgccggcgacagcgctgaggcggtacatatcgctgagcagattggttatccggtcgcgctgaagctgcgctctcccgatattccgcacaaatcggatgtacagggcgtcatgctgtatctgcgcaccgcgacagaagtacaacaggccgcggatgccattatcgatcgcgtaaaaatgacgtggccacaggcccggatccacggcctgctggtgcagagcatggccaaccgtgcgggtgcacaggagctgcgcgtggttgtcgaacacgatccggtttttggtccgctcattatgctgggtgaaggcggcgttgagtggcggccagaagaacaggcggttgtcgcgcttcctcctctaaacatgaacctggcgcgttatttgattattcaggccatcaaaagcaaaaaaatccgcgggagaagcgctctgcggccgcttgatatcgccggattaagccagtttctggtgaaggtctccaacctcattgttgactgtgcggagatccagcgcctggatattcacccccttcttgcctccggaaatgaatttaccgcgctggacgtgacgctggatattgcgccctttatcggtgatcgggaaagccgtctcgccattcgtccttatcctcttcatctggaagagtgggtggagatgaaaaatggggaacgggcgctgtttcgccctatcctgccggaagacgagccgctgctgcgggcgttcatctcgcaggtgacgaaggaagatttgtactatcgctatttcagcgaaatcaatgaatttacccacgacgatttagccaatatgacccagatcgactacgatcgagaaatggcgattgtggcggtccgccgttccggagcgggagaggagatcctcggcgtgacgcgtgccatttccgacccggataacgtggatgcggagtttgccgtactggtgcgttccgatcttaagggtttggggttgggcagacggctgctcgaaaaactcattggttatacgcgcgatcacggattgtcacgcctgaatggcattactatgccaaacaatcggggtatggtgaccctggcgcggaagctcggttttgacgttgatatccagctggatgaaggcattgtctctctgtccctcagcctgatttcgacggataaacaagagtaa

SEQ ID NO: 7432 - protein, 887 aa, Enterobacter cloacae
  misc_feature (324)..(324): Xaa can be any naturally occurring amino acid
MSQRGLEALLRPKSIAVIGASMKPDRAGCLMMRNLLAGGFNGPVMPVTPAYKAVQGVLAWPDVQSLPFVPDLAVLCTHAKRNLELLESLGQKGCKTCIILSSPPEQQPELLACASRYQMRILGPNSLGLLAPWQGLNASFSPVPIRKGKLAFISQSAAVSNTILDWAQQREMGFSYFIALGDSLDIDVDELLDFLARDSKTSAILLYLEHLSDARRFVSASRSASRNKPILVIKSGRSPAAQRLLHSRSGMDPAWDAAIQRAGLLRVQDTHELFSAVETLSHMRPLRGEKLMIVSNGAAPAALALDELWLRNGKLATLGEETLXRLRDALPGSVVPGNPLDLRDDASSDRYIKAITILLDSQDFDALMIIHSPSAVAPGSESARALIEAVRKHPRGKYVTLLTNWCGEFSSQEARRLFSEAGLPTYRTPEGTITAFMHMVEYRRNQKQLRETPALPGNLTANSVDVHRLLQQAIEEGATSLDTHEVQPILGSYGMQTLPTWIAGDSAEAVHIAEQIGYPVALKLRSPDIPHKSDVQGVMLYLRTATEVQQAADAIIDRVKMTWPQARIHGLLVQSMANRAGAQELRVVVEHDPVFGPLIMLGEGGVEWRPEEQAVVALPPLNMNLARYLIIQAIKSKKIRGRSALRPLDIAGLSQFLVKVSNLIVDCAEIQRLDIHPLLASGNEFTALDVTLDIAPFIGDRESRLAIRPYPLHLEEWVEMKNGERALFRPILPEDEPLLRAFISQVTKEDLYYRYFSEINEFTHDDLANMTQIDYDREMAIVAVRRSGAGEEILGVTRAISDPDNVDAEFAVLVRSDLKGLGLGRRLLEKLIGYTRDHGLSRLNGITMPNNRGMVTLARKLGFDVDIQLDEGIVSLSLSLISTDKQE

SEQ ID NO: 7433 - DNA, 2793 bp, Enterobacter cloacae complex
  misc_feature (1474)..(1474): n is a, c, g or t
atggttcagatcccagaaaacccacttatactcgtcgatggctcttcttacctgtatcgggcgtatcatgcgtttcctcctctgaccaacagcgcaggggaacctaccggcgcaatgtacggcgtgctgaatatgcttcgcagcctgattctgcaataccacccaacccatgcggccgtggtgtttgatgcgaagggtaaaaccttccgcgatgaattatttgagcattacaaatctcaccgtccccctatgcctgacgatctgcgtgcgcaaattgaaccgttgcacgctatggtgaaagcgatggggctgccactgctggcggtctcaggcgttgaagctgatgacgtaattggtaccctggcgcgcgaagcggaaaaagcaggccgcccggttctgatcagtaccggtgataaagacatggcgcagctggtaacgcccgggatcacgctgatcaacaccatgacaaacaccattcttggcccggaagaagtggtcgccaaatatggcgtgccgccagagctcattattgatttcctcgccctgatgggcgattcctcggataacattcctggcgtaccgggcgtaggcgaaaaaacagctcaggcgctgctgcaagggctgggcgggctggatacgctgtatgcagaacccgacaaaattgccggtcttaccttccgtggcgcaaaaaccatggccggaaagctcgccgataacaaagaggtggcttatctctcctatcagttggccaccatcaaaactgacgtagagctggagcttacctgcgagcagctggaagtgcaggaacccgccgccgacgaactgcttggcctgttcagaaaatacgaatttaaacgctggaccgcggatgttgaagccgggaaatggcttcaggcgaaaggggctaaacctgcggcgaagccgaaagagaccatcgttgtcgatgccgaagagcaggcagaagaagaggcggcagcgctctccttcgacaactatgaaaccatccttgaagagtcacggctcgtcgcctggattgaaaagctgaaaaaagcgccagtatttgctttcgataccgaaacggacagcctcgataacattacggccaatatggtgggcctgtcattcgcaacggagccgggtattgcagcctatgttccggtggctcacgactatctggatgcgccggagcaaatctcccgcgagcgcgccttagaactgctgaagccgattctggaagacgagaaagcgctgaaggtcgggcaaaacctgaagtacgaccgcggtattctgcaaaactacggcattgagctgcgtggtatcgcttttgacaccatgctggaatcttacattctggacagcgtggcgggccgccatgatatggattccttatccgatcgttggctgaaacacaaaaccatcacctttgaagaaattgccgggaagggcaaaaatcagctgacctttaaccagatcncgctggaagaagcaggccgctacgccgcggaagacgctgacgtcacgctacagctgcatctcaaaatgtggccgaaattgcagaagcacgaagggccgctgaatgtgttccagaacattgagatgccgctggtgcctgtgctgtcccgcattgagcgcaatggcgttaaaatcgacccaacggtgctgcataaccactctggtgagctggcgcagcgcctgaccgagcttgaacagaaagcgcatgagcttgctggcgaggcatttaacctgtcttcaccgaaacagctgcaaaccatcctgtttgaaaaacagggtatcaagccgctgaagaaaaccccgggtggcgccccttcaacgtctgaagaggtgctggaagagctggcgctggactatccgctgccaaaagttattctgcaataccgtggtctggctaagctgaaatcgacctataccgacaaactgccgttgatgatcaacccgaaaacgggccgcgtgcacacctcctatcaccaggctgtggcggcgaccgggcgactttcgtcaaccgatcccaaccttcaaaacattccggtgcgtaatgaagagggccgtcgtattcgccaggctttcattgcgccagaggattacctgattgtctccgcggactactcgcaaatcgaactgcgtattatggcgcacctgtcacgcgacaaaggcctgctgacggcctttgccgaagggaaggacatccaccgggcaaccgctgccgaagtgtttgggctgccgctggagagcgtgacaaacgagcagcgtcgtagtgcaaaagcgatcaacttcggtctgatttacggcatgagtgcctttggtctttcacgccagctcaatatcccgcgtaaagagtcgcagaagtatatggatctctacttcgagcggtatccgggcgtgctggaatatatggaacgtacccgcgcacaggcgaaagagaaaggctacgttgaaacgctggatggccgtcgtctctaccttccggacatcaaatccagcaacgccgcgcgccgggctggtgctgaacgtgctgcgatcaacgcccctatgcagggcactgcggcggacatcattaaacgcgcaatgattgccgtcgatgcctggctcgaaaaagagaaaccgcgcgtgaaaatgatcatgcaggtacacgatgaactggtctttgaagttcataaagacgatctggagacggtctctcagaagatccatgaactgatggaaaacagcatgaagctggacgtaccattgctggtggaagtgggtagcggcgaaaactgggatcaggctcactaa

SEQ ID NO: 7434 - protein, 930 aa, Enterobacter cloacae complex
  misc_feature (492)..(492): Xaa can be any naturally occurring amino acid
MVQIPENPLILVDGSSYLYRAYHAFPPLTNSAGEPTGAMYGVLNMLRSLILQYHPTHAAVVFDAKGKTFRDELFEHYKSHRPPMPDDLRAQIEPLHAMVKAMGLPLLAVSGVEADDVIGTLAREAEKAGRPVLISTGDKDMAQLVTPGITLINTMTNTILGPEEVVAKYGVPPELIIDFLALMGDSSDNIPGVPGVGEKTAQALLQGLGGLDTLYAEPDKIAGLTFRGAKTMAGKLADNKEVAYLSYQLATIKTDVELELTCEQLEVQEPAADELLGLFRKYEFKRWTADVEAGKWLQAKGAKPAAKPKETIVVDAEEQAEEEAAALSFDNYETILEESRLVAWIEKLKKAPVFAFDTETDSLDNITANMVGLSFATEPGIAAYVPVAHDYLDAPEQISRERALELLKPILEDEKALKVGQNLKYDRGILQNYGIELRGIAFDTMLESYILDSVAGRHDMDSLSDRWLKHKTITFEEIAGKGKNQLTFNQIXLEEAGRYAAEDADVTLQLHLKMWPKLQKHEGPLNVFQNIEMPLVPVLSRIERNGVKIDPTVLHNHSGELAQRLTELEQKAHELAGEAFNLSSPKQLQTILFEKQGIKPLKKTPGGAPSTSEEVLEELALDYPLPKVILQYRGLAKLKSTYTDKLPLMINPKTGRVHTSYHQAVAATGRLSSTDPNLQNIPVRNEEGRRIRQAFIAPEDYLIVSADYSQIELRIMAHLSRDKGLLTAFAEGKDIHRATAAEVFGLPLESVTNEQRRSAKAINFGLIYGMSAFGLSRQLNIPRKESQKYMDLYFERYPGVLEYMERTRAQAKEKGYVETLDGRRLYLPDIKSSNAARRAGAERAAINAPMQGTAADIIKRAMIAVDAWLEKEKPRVKMIMQVHDELVFEVHKDDLETVSQKIHELMENSMKLDVPLLVEVGSGENWDQAH

SEQ ID NO: 7435 - DNA, 1374 bp, Enterobacter cloacae
  misc_feature (964)..(964): n is a, c, g or t
atgtctgtaccatctatcgactgggatttggccctgatccagaaatataactattccgggccgcgttatacctcataccccaccgcgctggagttttctgacgctttcggcgaggcggattttcagcaagctgtggcgcgctatcccgagcgcccgctgtcgctctacgtccatattccgttctgccataagctctgctacttctgcggctgcaataaaatcgttacccgccagcagcacaaagccgatcaatacctcgatgcgctcgaacaggaaattctgcaccgcgcaccgctgtttaaagggcgtcacgtcagccaacttcactggggcggtggtacgccaacttatctgaataaagcgcagatcagccgcctgatggcgctgctgcgcggcaattttagttttaacgacgacgccgaaatttcgatcgaggtcgatccgcgtgaaatcgagctggatgtgctggatcatttacgtgccgaaggtttcaaccgcctgagtatgggcgtacaggacttcaacaaagaagtacagcgcctggtaaaccgcgagcaggacgaagcgtttatctttgccttactcaaccatgcgcgtgaaatcggctttacctcaacgaatatagacctgatttacggcctgccgaagcagacgccggagagcttcgcctacacgcttaaacgcgtggctgagcttaacccggaccgtctgagcgtctttaactatgcgcacctgccgacgctgttcgccgctcagcgcaaaatcaaagatgcggatctgccttccgcccagcagaagctggacattttgcaggagaccatcgcctcgctgaccgaaaccggctatcagtttatcggaatggatcactttgcccgccctgacgatgagctggcgattgcccagcgcgaaggtgttctccaccgtaacttccagggctacaccacccagggcgataccgatctgntcggaatgggcgtctccgccatcagcatgattggcgactgctacgcccagaatcagaaagagctgaagctgtactatcagcagatagacgaaaccggcaacgcgctgtggcgcggcattgcgctaacgcgcgacgactgcatccgtcgggacgtgattaaggcgcttatctgcaacttccgtctcgaatttcgcgaggtggagtcgcaatgggatctgcaattcagcgattactttgccgaagacctgaagcttctggcgccgctggcgaaagacgggctggtggatgtgtcggagagtgcggttgtcgtcacgccgaaaggacgtctgttgattcgtaatatctgcatgtgcttcgatgcctatctgcgtcagaaggcgcgtttacagcagttctcgcgggtgatttga

SEQ ID NO: 7436 - protein, 457 aa, Enterobacter cloacae
  misc_feature (322)..(322): Xaa can be any naturally occurring amino acid
MSVPSIDWDLALIQKYNYSGPRYTSYPTALEFSDAFGEADFQQAVARYPERPLSLYVHIPFCHKLCYFCGCNKIVTRQQHKADQYLDALEQEILHRAPLFKGRHVSQLHWGGGTPTYLNKAQISRLMALLRGNFSFNDDAEISIEVDPREIELDVLDHLRAEGFNRLSMGVQDFNKEVQRLVNREQDEAFIFALLNHAREIGFTSTNIDLIYGLPKQTPESFAYTLKRVAELNPDRLSVFNYAHLPTLFAAQRKIKDADLPSAQQKLDILQETIASLTETGYQFIGMDHFARPDDELAIAQREGVLHRNFQGYTTQGDTDLXGMGVSAISMIGDCYAQNQKELKLYYQQIDETGNALWRGIALTRDDCIRRDVIKALICNFRLEFREVESQWDLQFSDYFAEDLKLLAPLAKDGLVDVSESAVVVTPKGRLLIRNICMCFDAYLRQKARLQQFSRVI

SEQ ID NO: 7437 - DNA, 1371 bp, Staphylococcus aureus
  misc_feature (591)..(591): n is a, c, g or t
atgaatagtgataatatgtggttaacagtaatggggctcattattattatttcaattgtaggtttactcattgccaaaaagataaatccagttgtaggtatgacaatcataccttgcttaggggcaatgattttaggatatagtgtgacagatttggttggattttttgctaaagggttagatcaagtcatcaacgttgttattatgtttatctttgccattattttctttggcatcatgaacgatagtggtttattcaagccgcttgtcaaacgcttaatattaatgacacgaggcaatgtcgtcattgtctgtgcaatgacagctttaattggcacaatagcccaattagatggggccggtgcggtaacatttttgctttctattcctgcattattacctttatataaagcgttaaatatgaataaatatttattgattttactattagcattaagcgcggcgattatgaacatggtaccttggggaggtccaatggctcgtgtagctgcagtgttaaaagccaaaagtgtcaatgaattatggtatggattaatacctattcaaataataggtttcattcttgttatnttgtttgcggtatatcttggatttaaagaacagaaacgtatcaaaaaagcaatagagagaaatgaattaccgcaaacacaagatatagatgtacataaattagttgaagtatatgaacgagatcaagatgtaaggtttcctgtaaaaggacgtgcaagaacaaaatcatggataaaatgggtgaatacagctttaactttagctgttattctatcgatgttaataaatattgcgccacctgaatttgcattcatgataggtgtttcgttggcacttgttattaattttaaatcagtggatgaacaaatggaacgattaagagcgcatgcgccgaatgcattaatgatggctgcagtgattattgcagcaggtatgtttttaggtgtactaaatgaaaccggtatgcttaaagcgattgcgaccaatttaatcaaagtgattcctgcagaagtaggaccatacttgcatattattgtaggtttacttggcgtaccattagatttactaactagcacagacgcttattattttgctgtgttaccgattgtcgaacaaacagcagggcaatttggtgtaccgtctgtatcaacagcttattcaatggtcatagggaatattataggtacatttgtcagcccattttcaccagccttatggttggcaattggtttagcagaggcaaacatgggcacgtatattaagtatgcattcttttggatttggggattcgctatcgttatgttagtaattgcaatgttgatgggcattgtgacgatttaa

SEQ ID NO: 7438 - protein, 456 aa, Staphylococcus aureus
  misc_feature (197)..(197): Xaa can be any naturally occurring amino acid
MNSDNMWLTVMGLIIIISIVGLLIAKKINPVVGMTIIPCLGAMILGYSVTDLVGFFAKGLDQVINVVIMFIFAIIFFGIMNDSGLFKPLVKRLILMTRGNVVIVCAMTALIGTIAQLDGAGAVTFLLSIPALLPLYKALNMNKYLLILLLALSAAIMNMVPWGGPMARVAAVLKAKSVNELWYGLIPIQIIGFILVXLFAVYLGFKEQKRIKKAIERNELPQTQDIDVHKLVEVYERDQDVRFPVKGRARTKSWIKWVNTALTLAVILSMLINIAPPEFAFMIGVSLALVINFKSVDEQMERLRAHAPNALMMAAVIIAAGMFLGVLNETGMLKAIATNLIKVIPAEVGPYLHIIVGLLGVPLDLLTSTDAYYFAVLPIVEQTAGQFGVPSVSTAYSMVIGNIIGTFVSPFSPALWLAIGLAEANMGTYIKYAFFWIWGFAIVMLVIAMLMGIVTI

SEQ ID NO: 7439 - DNA, 768 bp, Staphylococcus aureus
  misc_feature (725)..(725): n is a, c, g or t
atgaaaaaaatcgttacagctacaatcgctacagcaggacttgccactatcgcatttgcaggacatgatgcacaagccgcagaacaaaataacaatggatataattctaatgacgctcaatcatacagctatacgtatacaattgatgcacaaggtaattatcattacacttggacaggaaattggaatccaagtcaattaacgcaaaacaacacatactactacaacaactacaatacttatagttataacaatgcatcttacaataactactataatcattcatatcaatacaataactatacaaacaatagtcaaacagcaacaaataactattatactggtggttcaggtgcaagttatagcacaacaagtaataatgttcatgtgactacaactgcagcgccatcttcaaatggtcgttcaatttctaatggttatgcatcaggaagtaacttatatacttcaggacaatgtacttattatgtatttgatcgtgttggtgggaaaattggttcaacatggggtaacgcaagtaattgggctaacgcagctgcatcatctggctatacagtgaacaatacaccaaaagttggtgctatcatgcaaacaacacaaggctattacggtcatgttgcttacgttgaaggcgttaacagcaacggttctgttcgtgtttcagaaatgaactatggacatggtgctggtgtggttacgtctcgtanaatttcagcaaaccaagcaggttcatataatttcattcattaa

SEQ ID NO: 7440 - protein, 255 aa, Staphylococcus aureus
  misc_feature (242)..(242): Xaa can be any naturally occurring amino acid
MKKIVTATIATAGLATIAFAGHDAQAAEQNNNGYNSNDAQSYSYTYTIDAQGNYHYTWTGNWNPSQLTQNNTYYYNNYNTYSYNNASYNNYYNHSYQYNNYTNNSQTATNNYYTGGSGASYSTTSNNVHVTTTAAPSSNGRSISNGYASGSNLYTSGQCTYYVFDRVGGKIGSTWGNASNWANAAASSGYTVNNTPKVGAIMQTTQGYYGHVAYVEGVNSNGSVRVSEMNYGHGAGVVTSRXISANQAGSYNFIH

SEQ ID NO: 7441 - DNA, 1494 bp, Staphylococcus aureus
  misc_feature (245)..(245): n is a, c, g or t
atgactaaacatatcatcgttattggtggtggcttaggtgggatttctgcagcaattcgaatggcacaaagtggctattcggtctcattatatgaacaaaataatcatataggaggcaaagtgaatcgtcatgaatcagatggctttggctttgatttaggtccatctattttaacgatgccttatatttttgaaaaattattcgaatatagcaagaagcaaatgtcagactacgttacaatcangcgattgccacatcaatggcgtagcttttttccagatggaacgactatcgatttgtatgaaggtattaaagaaacaggtcagcataatgcgatattgtcgaaacaggatatagaggaactgcaaaattatttgaattatacaagacgaatcgatcgtattactgaaaaagggtatttcaactatggtttagatacactatctcaaattattaaatttcatgggccattaaatgctcttattaattatgattatgtacatactatgcaacaggccatagacaagcgtatctcgaatccatacttgcgacaaatgttaggctattttatcaaatatgtaggttcttcatcatacgatgcgccagctgtattatctatgttattccatatgcaacaagagcaaggcctttggtatgtagaaggtggaatccatcatttagccaatgccttggaaaagctagcgcgtgaagaaggtgtcacaattcatacaggtgcacgtgtggacaatattaaaacatatcaaagacgtgtgacgggtgtcagattagatacaggtgagtttgtaaaggcagattatattatttcaaatatggaagtcatacctacttataaatatttaattcaccttgatactcaacgattaaacaaattagagagggaatttgagccggcaagctcaggatatgtgatgcatttaggtgttgcttgccaatacccgcaattagcacatcataatttcttttttacggaaaatgcttatctcaattatcaacaagtttttcatgaaaaggtattgccagatgatccgaccatttatctagtaaatacgaataaaactgatcacacacaagcgccagtaggttatgaaaatatcaaagtcttaccacatattccatatattcaagatcagccttttaccactgaagattatgcgaagtttagggataaaattttggataaattagaaaaaatgggacttactgatttaagaaaacacattatttatgaagatgtttggacaccggaggatattgaaaaaaattatcgttctaatcgtggtgcaatatatggtgttgtagcagataaaaagaaaaacaaaggatttaaatttcctaaagaaagtcagtattttgaaaacttgtactttgtaggtggatcagtaaatcctggtggtggcatgccaatggttacattaagtgggcaacaagtcgcagacaaaataaacgcgcgagaagcgaagaataggaagtga

SEQ ID NO: 7442 - protein, 497 aa, Staphylococcus aureus
  misc_feature (82)..(82): Xaa can be any naturally occurring amino acid
MTKHIIVIGGGLGGISAAIRMAQSGYSVSLYEQNNHIGGKVNRHESDGFGFDLGPSILTMPYIFEKLFEYSKKQMSDYVTIXRLPHQWRSFFPDGTTIDLYEGIKETGQHNAILSKQDIEELQNYLNYTRRIDRITEKGYFNYGLDTLSQIIKFHGPLNALINYDYVHTMQQAIDKRISNPYLRQMLGYFIKYVGSSSYDAPAVLSMLFHMQQEQGLWYVEGGIHHLANALEKLAREEGVTIHTGARVDNIKTYQRRVTGVRLDTGEFVKADYIISNMEVIPTYKYLIHLDTQRLNKLEREFEPASSGYVMHLGVACQYPQLAHHNFFFTENAYLNYQQVFHEKVLPDDPTIYLVNTNKTDHTQAPVGYENIKVLPHIPYIQDQPFTTEDYAKFRDKILDKLEKMGLTDLRKHIIYEDVWTPEDIEKNYRSNRGAIYGVVADKKKNKGFKFPKESQYFENLYFVGGSVNPGGGMPMVTLSGQQVADKINAREAKNRK

SEQ ID NO: 7443 - DNA, 2490 bp, Staphylococcus aureus
  misc_feature (268)..(268): n is a, c, g or t
ttggcaaaatttttatataagatggggacattcatcgcaaaacataaatggtccgcggtcattgcatggatagtgattgtagctgcaatattgataccacttgctacaaatgcaccgaaatttgacaatgatattaaaatgacaggattagagtcgttagatacgaataaaaagattgaaaaacattttaatcaagatagtgaaaaggcacaaatacgtgttgtctttaagacgactaaagatgatggtattgtgcaaccgaacattnctaaagatattaagaaaacgttagatgatattaaaaaagatgacaagcacattgataaaatatcagatccttatgaaaataagcaaattagtaaagataaaacaactgcatttgcagatatcacatatgacgttagtcaaacatctttaaaagatggctctagagataatgttaaaagtcatttgaaagacttacgtgacaatcataatgtacaaacagagttaactggtacaggaatgacatctacagaagtaggcggtaattctgaactagttggtattattgttgcatttgttgtactgttaatcacattcggttcagtcattgctgcaggattaccaattataagtgcattgattggtctagcctctggtgtaggtattatcagtttgttaacttatgcattcgatataccaaatgtcacactgacattagccgtaatgattggactagcagttggtatcgattatgcattatttattttattcagatatcgacaagttatgaaaactgaaacagattacattaaaggcattggtcttgcaataggaacagcaggtagtgcagttgtttttgctggtgtaacagttgtaattgcagtatgtggtttatcattagtaggcattgacttcttagcggtaatgggatttgcttcggcaattagtgttgtttttgcagtacttagcgctttaactttattacctgcattaataagcattttccataaacgcattaaagtgaataaattacagtctaaattcaaaaaagatattgatacgccatggtctaaatttattacaggaaatgcacttgcggcagtattactaggtttaatcatattagtagcagctgcaataccagttagtcatatgcgacttggtattccagatgacggtgttaaaccagcagattctacacagaaaaaagcttacgatattatctcggataaatttggtgaaggatttaatggccaaataccgatgttgataaatgtgaaagataaaaaggatgatccacaaggattacaacaagatttacagtctgtatataaagatattaaagataagaaaaatgtagatatcgttacgccaccacaaatgagtaaagataatgattacgctttgatggtcgtgatacctaagcaagggcctaatgcagagagtacaaatgatttagtgcatgatttacgagattatcataaagatgcacaagataaatatgggttcaaaacggagatttcgggacaaagtgtcattaatattgatatgtctaaaaagttaaatgaggcgatacctttatttgcctcagtcattgttgtattagcatttttcttattaatgattgtcttccgttcaattctaataccattaaaagcagttttaggattcgtcttgtcattaatggcaacattaggatttacaacattagtaatgcaagatggttttatgaaaggtctgtttggtattgaaacgacaggaccaatgctagcatttttaccggttattactataggtatcttatttggattagcgatggattatgaagtcttccttatgtcgcgaattcatgaagaatatagtaaaacaggggataatgattattctatcaaagtaggattgaaagaaagcggtcctgttattgtagcagctgcattaattatgtttagtgtcttctttgcgtttgtattccaagaagatgtcatgattaaatcaatgggtatggcattagcgtttggtgtactctttgatgccttcgtagtcagaatgatgttaattcctgcattaacgaaattgtttggaaaaggttcgtggtatttaccagcatggttgaatcgcattattccacgagttgatattgaaggacatgcacttgaaaaatataaaacggttgaatcacaggaatctgaagctaaagatagtaaggaaacatacgacacaacctttaaagtatatccacaaggtgcaacaaatgtatcgaaacatcaagatgcacatgggcaagatgatgcacattcaatagtactagatgataaaacgatggcattgtaccaagaagtgaaacagcaatcagcaagttcattgttcttatatgatgctttaatagattatcaaaacaagcatcaactaaattcaaaacaacaagcaacgaatatagaacagttgaataaaaatattgaaaagctcaatcaattgttagaaaaaaatctacgaaataaatcataa

SEQ ID NO: 7444 - protein, 829 aa, Staphylococcus aureus
  misc_feature (90)..(90): Xaa can be any naturally occurring amino acid
MAKFLYKMGTFIAKHKWSAVIAWIVIVAAILIPLATNAPKFDNDIKMTGLESLDTNKKIEKHFNQDSEKAQIRVVFKTTKDDGIVQPNIXKDIKKTLDDIKKDDKHIDKISDPYENKQISKDKTTAFADITYDVSQTSLKDGSRDNVKSHLKDLRDNHNVQTELTGTGMTSTEVGGNSELVGIIVAFVVLLITFGSVIAAGLPIISALIGLASGVGIISLLTYAFDIPNVTLTLAVMIGLAVGIDYALFILFRYRQVMKTETDYIKGIGLAIGTAGSAVVFAGVTVVIAVCGLSLVGIDFLAVMGFASAISVVFAVLSALTLLPALISIFHKRIKVNKLQSKFKKDIDTPWSKFITGNALAAVLLGLIILVAAAIPVSHMRLGIPDDGVKPADSTQKKAYDIISDKFGEGFNGQIPMLINVKDKKDDPQGLQQDLQSVYKDIKDKKNVDIVTPPQMSKDNDYALMVVIPKQGPNAESTNDLVHDLRDYHKDAQDKYGFKTEISGQSVINIDMSKKLNEAIPLFASVIVVLAFFLLMIVFRSILIPLKAVLGFVLSLMATLGFTTLVMQDGFMKGLFGIETTGPMLAFLPVITIGILFGLAMDYEVFLMSRIHEEYSKTGDNDYSIKVGLKESGPVIVAAALIMFSVFFAFVFQEDVMIKSMGMALAFGVLFDAFVVRMMLIPALTKLFGKGSWYLPAWLNRIIPRVDIEGHALEKYKTVESQESEAKDSKETYDTTFKVYPQGATNVSKHQDAHGQDDAHSIVLDDKTMALYQEVKQQSASSLFLYDALIDYQNKHQLNSKQQATNIEQLNKNIEKLNQLLEKNLRNKS

SEQ ID NO: 7445 - DNA, 1995 bp, Staphylococcus aureus
  misc_feature (1792)..(1792): n is a, c, g or t
atggaaaattattgtattttaggaaatcctaatgttggtaaaacatctttgtttaacgctttaactggttcgtatgaatatataggcaactggagtggcgtaacggtagagaaaaaagtagggaaacttaaagaaaatgtaggacaattaattgatttaccaggtacatatgatttatcgccgatttctaaagatgaaactgtagtgacagactatttattaaacgattcattttcaggaatcattaacattgttgatgcgagtcaactaaaaagaaatatgcaattaacagtacaattgttagaacttaatcaaccaatatacatcggattaaatatgattgatgtagctacaaagcgcgggataaaaatcgattatcataaattgatgaaaaagttaaaaacacctatttttccagttgtggcacgtacaggcaaaggaacaaaatatttacttggcgaaataaagcatctaggggaagggtatcaaccgcattttaaaatcaattatggtgagaagattgaagagacaattaaaaatatgtgtcaaataataatgacagagacatctcatgataagtatcaagctaggtttattgcgattcaattcttattaaataacatgcaaattgcaaacgaacttaattcagaggttgtaaataaattgtcgagtttacgtgatcaagttgctgaacaagtaggggctgtatctgttcgtcgagagatggagcgtatacgcaatcattatattgagacgttattgcaagacgtggtaacgtatccagatgaagataagcaatatttcagctctagaatagacaagatattaacacataaatatatagggatgcctatctttctagcaattatgtggttgatctttcaaactacatttacatggattggcacacctttgtcggatcaactcgatgcatttataggtggtacatttacagatagtgtgaagacgattatgaattatcttggtgttataccatttttacaagatttaattacagatggcattattgctggtgtaggatcagtattagtctttgtaccacaaattgttgtgctctttttctttatatctttattagaagattcgggttatatggcacgtattgcggttttaatggatcgtattatggaatcgttcggtttaagcgggaagtcttttataccaatgattatcggatttggttgtaatgtaccgagtattatggctgcgcgcagtattgaaaatgaaaaagagcgtttaacaacgatattaattgcaccattcatgtcatgctctgctagactgccagtgtatgcgttgttcgtaggtatctttttcaaagagaatcaatctttagtagtattaagcctgtatgttttaggtattattatggcatttttagtcagtacagtacttactaagacgattttaaaaaatgataatgcaatctttattgtggaattgccaacataccgtgtgccttccattaaaacgttgtggcgtagtacttgggaaaaggctaagggctttgttcgtaaagcaggtacatttatttttggcggctcagtagtcatttggctattaagttatgtaggaccacatggtatcaatgtgaatatcaatcaaagttttttacatatggttggtagtttctttggtatgttagtgcaaccgctcggatttggaacatggcaagcaggtgctacgttagtgccaggatttttagcaaaagaagttatcgtaagttcgatggcgattatctattcatcaggtgatgcaggccttgttaatntgattcaaaatcaattcacaccgctatctgcgtatgcatttatgatatttatactattgtatattccttgtgtttctacagtagcagcaatccgtaaagagacttattcatggaaatggacggcacttgcagttgcctatcctctagtcactgcatatgtcttaacattcattttttatcaagtcggacatttatttgtttaa

SEQ ID NO: 7446 - protein, 664 aa, Staphylococcus aureus
  misc_feature (598)..(598): Xaa can be any naturally occurring amino acid
MENYCILGNPNVGKTSLFNALTGSYEYIGNWSGVTVEKKVGKLKENVGQLIDLPGTYDLSPISKDETVVTDYLLNDSFSGIINIVDASQLKRNMQLTVQLLELNQPIYIGLNMIDVATKRGIKIDYHKLMKKLKTPIFPVVARTGKGTKYLLGEIKHLGEGYQPHFKINYGEKIEETIKNMCQIIMTETSHDKYQARFIAIQFLLNNMQIANELNSEVVNKLSSLRDQVAEQVGAVSVRREMERIRNHYIETLLQDVVTYPDEDKQYFSSRIDKILTHKYIGMPIFLAIMWLIFQTTFTWIGTPLSDQLDAFIGGTFTDSVKTIMNYLGVIPFLQDLITDGIIAGVGSVLVFVPQIVVLFFFISLLEDSGYMARIAVLMDRIMESFGLSGKSFIPMIIGFGCNVPSIMAARSIENEKERLTTILIAPFMSCSARLPVYALFVGIFFKENQSLVVLSLYVLGIIMAFLVSTVLTKTILKNDNAIFIVELPTYRVPSIKTLWRSTWEKAKGFVRKAGTFIFGGSVVIWLLSYVGPHGINVNINQSFLHMVGSFFGMLVQPLGFGTWQAGATLVPGFLAKEVIVSSMAIIYSSGDAGLVNXIQNQFTPLSAYAFMIFILLYIPCVSTVAAIRKETYSWKWTALAVAYPLVTAYVLTFIFYQVGHLFV

SEQ ID NO: 7447 - DNA, 771 bp, Staphylococcus aureus
  misc_feature (106)..(106): n is a, c, g or t
atgggaactttaattaaacaagaatgtttcaaattatttaaaaagaaatcaacttttatcgcacctattgtctttattctactaatggttgctcaaggttatattnctacaaaatacaatgaaatttttacgccacaggaatctttcacatctgcttataatggtttttcatggtttgcatttttattaattattcaagcaagtacaatcatttcaatggaatttcattacggtacgattaaaaatttactctatcgtgaatattcaagaacaactatgattgttagcaaaatcatcacattatttattatttctttaatttattttgttattacaattattgcttcaattgttattgggtctttattctttaatgatttaaatatatttgaaagtagcggtaatcaattatctttattgaatcaattattattagttagtttaggcacatttgttggcgtttggttagttttaagcttaacgttgctattatcatctgcaacaaattcaacgggagtagccattgctgtaggtattgttttttattttgcaagttctattttagcagttattcaaacggcacttttagaaaaaatagactggctaaagtggaatcctattaatatgatgaatattatgcttcaaacagttgaaaaaggctttagtaagtcgacaaaattagaacttcatgaattgtttattggtaatattgcttatatttctattttcttaatacttgtagtatttattttcaagaagaaaaatatttag

SEQ ID NO: 7448 - protein, 256 aa, Staphylococcus aureus
  misc_feature (36)..(36): Xaa can be any naturally occurring amino acid
MGTLIKQECFKLFKKKSTFIAPIVFILLMVAQGYIXTKYNEIFTPQESFTSAYNGFSWFAFLLIIQASTIISMEFHYGTIKNLLYREYSRTTMIVSKIITLFIISLIYFVITIIASIVIGSLFFNDLNIFESSGNQLSLLNQLLLVSLGTFVGVWLVLSLTLLLSSATNSTGVAIAVGIVFYFASSILAVIQTALLEKIDWLKWNPINMMNIMLQTVEKGFSKSTKLELHELFIGNIAYISIFLILVVFIFKKKNI

SEQ ID NO: 7449 - DNA, 765 bp, Staphylococcus aureus
  misc_feature (260)..(260): n is a, c, g or t
atgtctaactattcgactggagaactcgcaaaattatgcaatgtgacaacacgaacgattcaatattatgatcgcaaaggtattttgaaaccacaaggatttacagaaggaaagcgtcgtgtgtatacagaacaacagcgacaaacattagagttaatcttattgcttaaagatttaggttgtgcgttaagcgatatagatatgttgctaaaaggtgaaggtactttgaagacgctcaatactttactaactatgaaacnacaagaaattaaccaacaagttaaacagcaacaagcggtattaaacaaaattaaaaatgttcaatattacgtaaatgaagcgtcgacgtctccaatcacacacttaaaagacatagagcatgtcatgagtaaatcagctgaaatgaaaagtattcgtcgtaacatttggattagtgctggtattataggaataattcaatattctagcattataagtgcaattttgatgaaaaataaatggccgtttttaattgctttaccatttatgattggttatggcattggtgttactttttattaccaacaaaaggttgcctatttatgtcctaactgccagcatatattctcaccatctttgtgggcagttatcaaagcgaaacatacagcgacaacacgtcgattcgaatgtccaaactgtcatgaaacgcattattgcattgaagtacctaaagcgcatatgagtacagaacaattagaaatatcccacatacaacataacaattaa

SEQ ID NO: 7450 - protein, 254 aa, Staphylococcus aureus
  misc_feature (87)..(87): Xaa can be any naturally occurring amino acid
MSNYSTGELAKLCNVTTRTIQYYDRKGILKPQGFTEGKRRVYTEQQRQTLELILLLKDLGCALSDIDMLLKGEGTLKTLNTLLTMKXQEINQQVKQQQAVLNKIKNVQYYVNEASTSPITHLKDIEHVMSKSAEMKSIRRNIWISAGIIGIIQYSSIISAILMKNKWPFLIALPFMIGYGIGVTFYYQQKVAYLCPNCQHIFSPSLWAVIKAKHTATTRRFECPNCHETHYCIEVPKAHMSTEQLEISHIQHNN

SEQ ID NO: 7451 - DNA, 2580 bp, Staphylococcus aureus
  misc_feature (2564)..(2564): n is a, c, g or t
atgagagataagaaaggaccggtaaataaaagagtagattttctatcaaataaattgaataaatattcaataagaaaatttacagttggaacagcatctattttaattggctcactaatgtatttgggaactcaacaagaggcagaagcagctgaaaacaatattgagaatccaactacattaaaagataatgtccaatcaaaagaagtgaagattgaagaagtaacaaacaaagacactgcaccacagggtgtagaagctaaatctgaagtaacttcaaacaaagacacaatcgaacatgaaccatcagtaaaagctgaagatatatcaaaaaaggaggatacaccaaaagaagtagctgatgttgctgaagttcagccgaaatcgtcagtcactcataacgcagagacacctaaggttagaaaagctcgttctgttgatgaaggctcttttgatattacaagagattctaaaaatgtagttgaatctaccccaattacaattcaaggtaaagaacattttgaaggttacggaagtgttgatatacaaaaaaaaccaacagatttaggggtatcagaggtaaccaggtttaatgttggtaatgaaagtaatggtttgataggagctttacaattaaaaaataaaatagattttagtaaggatttcaattttaaagttagagtggcaaataaccatcaatcaaataccacaggtgctgatggttgggggttcttatttagtaaaggaaatgcagaagaatatttaactaatggtggaatccttggggataaaggtctggtaaattcaggcggatttaaaattgatactggatacatttatacaagttccatggacaaaactgaaaagcaagctggacaaggttatagaggatacggagcttttgtgaaaaatgacagttctggtaattcacaaatggttggagaaaatattgataaatcaaaaactaattttttaaactatgcggacaattcaactaatacatcagatggaaagtttcatgggcaacgtttaaatgatgtcatcttaacttatgttgcttcaactggtaaaatgagagcagaatatgctggtaaaacttgggagacttcaataacagatttaggtttatctaaaaatcaggcatataatttcttaattacatctagtcaaagatggggccttaatcaagggataaatgcaaatggctggatgagaactgacttgaaaggttcagagtttacttttacaccagaagcgccaaaaacaataacagaattagaaaaaaaagttgaagagattccattcaagaaagaacgtaaatttaatcctgatttagcaccagggacagaaaaagtaacaagagaaggacaaaaaggtgagaagacaataacgacaccaacactaaaaaatccattaactggagtaattattagtaaaggtgaaccaaaagaagagattacaaaagatccgattaatgaattaacagaatacggacctgaaacaatagcgccaggtcatcgagacgaatttgatccgaagttaccaacaggagagaaagaggaagttccaggtaaaccaggaattaagaatccagaaacaggagatgtagttagaccgccggtcgatagcgtaacaaaatatggacctgtaaaaggagactcgattgtagaaaaagaagagattccattcgagaaagaacgtaaatttaatcctgatttagcaccagggacagaaaaagtaacaagagaaggacaaaaaggtgagaagacaataacgacaccaacactaaaaagtccattaactggagtaattattagtaaaggtgaatcgaaagaagaaatcacaaaagatccgattaatgaattaacagaattcggtggcgagaaaataccgcaaggtcataaagatatctttgatccaaacttaccaacagatcaaacggaaaaagtaccaggtaaaccaggaatcaagaatccagacacaggaaaagtgatcgaagagccagtggatgatgtgattaaacacggaccaaaaacgggtacaccagaaacaaaaacagtagagataccgtttgaaacaaaacgtgagtttaatccaaaattacaacctggtgaagagcgagtgaaacaagaaggacaaccaggaagtaagacaatcacaacaccaatcacagtgaacccattaacaggtgaaaaagttggcgagggtcaaccaacagaagagatcacaaaacaaccagtagataagattgtagagttcggtggagagaaaccaaaagatccaaaaggacctgaaaacccagagaagccgagcagaccaactcatccaagtggcccagtaaatcctaacaatccaggattatcgaaagacagagcaaaaccaaatggcccagttcattcaatggataaaaatgataaagttaaaaaatctaaaattgctaaagaatcagtagctaatcaagagaaaaaacgagcagaattaccaaaaacaggtttagaaagcacgcaaaaaggtttgatctttagtagtataattggaattgctggattaatgttattggctcntagaagaaagaattaa

SEQ ID NO: 7452 - protein, 859 aa, Staphylococcus aureus
  misc_feature (855)..(855): Xaa can be any naturally occurring amino acid
MRDKKGPVNKRVDFLSNKLNKYSIRKFTVGTASILIGSLMYLGTQQEAEAAENNIENPTTLKDNVQSKEVKIEEVTNKDTAPQGVEAKSEVTSNKDTIEHEPSVKAEDISKKEDTPKEVADVAEVQPKSSVTHNAETPKVRKARSVDEGSFDITRDSKNVVESTPITIQGKEHFEGYGSVDIQKKPTDLGVSEVTRFNVGNESNGLIGALQLKNKIDFSKDFNFKVRVANNHQSNTTGADGWGFLFSKGNAEEYLTNGGILGDKGLVNSGGFKIDTGYIYTSSMDKTEKQAGQGYRGYGAFVKNDSSGNSQMVGENIDKSKTNFLNYADNSTNTSDGKFHGQRLNDVILTYVASTGKMRAEYAGKTWETSITDLGLSKNQAYNFLITSSQRWGLNQGINANGWMRTDLKGSEFTFTPEAPKTITELEKKVEEIPFKKERKFNPDLAPGTEKVTREGQKGEKTITTPTLKNPLTGVIISKGEPKEEITKDPINELTEYGPETIAPGHRDEFDPKLPTGEKEEVPGKPGIKNPETGDVVRPPVDSVTKYGPVKGDSIVEKEEIPFEKERKFNPDLAPGTEKVTREGQKGEKTITTPTLKSPLTGVIISKGESKEEITKDPINELTEFGGEKIPQGHKDIFDPNLPTDQTEKVPGKPGIKNPDTGKVIEEPVDDVIKHGPKTGTPETKTVEIPFETKREFNPKLQPGEERVKQEGQPGSKTITTPITVNPLTGEKVGEGQPTEEITKQPVDKIVEFGGEKPKDPKGPENPEKPSRPTHPSGPVNPNNPGLSKDRAKPNGPVHSMDKNDKVKKSKIAKESVANQEKKRAELPKTGLESTQKGLIFSSIIGIAGLMLLAXRRKN

SEQ ID NO: 7453 - DNA, 2580 bp, Staphylococcus aureus
  misc_feature (1793)..(1793): n is a, c, g or t
atgagagataagaaaggaccggtaaataaaagagtagattttctatcaaataaattgaataaatattcaataagaaaatttacagttggaacagcatctattttaattggctcactaatgtatttgggaactcaacaagaggcagaagcagctgaaaacaatattgagaatccaactacattaaaagataatgtccaatcaaaagaagtgaagattgaagaagtaacaaacaaagacactgcaccacagggtgtagaagctaaatctgaagtaacttcaaacaaagacacaatcgaacatgaaccatcagtaaaagctgaagatatatcaaaaaaggaggatacaccaaaagaagtagctgatgttgctgaagttcagccgaaatcgtcagtcactcataacgcagagacacctaaggttagaaaagctcgttctgttgatgaaggctcttttgatattacaagagattctaaaaatgtagttgaatctaccccaattacaattcaaggtaaagaacattttgaaggttacggaagtgttgatatacaaaaaaaaccaacagatttaggggtatcagaggtaaccaggtttaatgttggtaatgaaagtaatggtttgataggagctttacaattaaaaaataaaatagattttagtaaggatttcaattttaaagttagagtggcaaataaccatcaatcaaataccacaggtgctgatggttgggggttcttatttagtaaaggaaatgcagaagaatatttaactaatggtggaatccttggggataaaggtctggtaaattcaggcggatttaaaattgatactggatacatttatacaagttccatggacaaaactgaaaagcaagctggacaaggttatagaggatacggagcttttgtgaaaaatgacagttctggtaattcacaaatggttggagaaaatattgataaatcaaaaactaattttttaaactatgcggacaattcaactaatacatcagatggaaagtttcatgggcaacgtttaaatgatgtcatcttaacttatgttgcttcaactggtaaaatgagagcagaatatgctggtaaaacttgggagacttcaataacagatttaggtttatctaaaaatcaggcatataatttcttaattacatctagtcaaagatggggccttaatcaagggataaatgcaaatggctggatgagaactgacttgaaaggttcagagtttacttttacaccagaagcgccaaaaacaataacagaattagaaaaaaaagttgaagagattccattcaagaaagaacgtaaatttaatcctgatttagcaccagggacagaaaaagtaacaagagaaggacaaaaaggtgagaagacaataacgacaccaacactaaaaaatccattaactggagtaattattagtaaaggtgaaccaaaagaagagattacaaaagatccgattaatgaattaacagaatacggacctgaaacaatagcgccaggtcatcgagacgaatttgatccgaagttaccaacaggagagaaagaggaagttccaggtaaaccaggaattaagaatccagaaacaggagatgtagttagaccgccggtcgatagcgtaacaaaatatggacctgtaaaaggagactcgattgtagaaaaagaagagattccattcgagaaagaacgtaaatttaatcctgatttagcaccagggacagaaaaagtaacaagagaaggacaaaaaggtgagaagacaataacgacaccaacactaaaaantccattaactggagtaattattagtaaaggtgaatcgaaagaagaaatcacaaaagatccgattaatgaattaacagaattcggtggcgagaaaataccgcaaggtcataaagatatctttgatccaaacttaccaacagatcaaacggaaaaagtaccaggtaaaccaggaatcaagaatccagacacaggaaaagtgatcgaagagccagtggatgatgtgattaaacacggaccaaaaacgggtacaccagaaacaaaaacagtagagataccgtttgaaacaaaacgtgagtttaatccaaaattacaacctggtgaagagcgagtgaaacaagaaggacaaccaggaagtaagacaatcacaacaccaatcacagtgaacccattaacaggtgaaaaagttggcgagggtcaaccaacagaagagatcacaaaacaaccagtagataagattgtagagttcggtggagagaaaccaaaagatccaaaaggacctgaaaacccagagaagccgagcagaccaactcatccaagtggcccagtaaatcctaacaatccaggattatcgaaagacagagcaaaaccaaatggcccagttcattcaatggataaaaatgataaagttaaaaaatctaaaattgctaaagaatcagtagctaatcaagagaaaaaacgagcagaattaccaaaaacaggtttagaaagcacgcaaaaaggtttgatctttagtagtataattggaattgctggattaatgttattggctcttagaagaaagaattaa

SEQ ID NO: 7454 - protein, 859 aa, Staphylococcus aureus
  misc_feature (598)..(598): Xaa can be any naturally occurring amino acid
MRDKKGPVNKRVDFLSNKLNKYSIRKFTVGTASILIGSLMYLGTQQEAEAAENNIENPTTLKDNVQSKEVKIEEVTNKDTAPQGVEAKSEVTSNKDTIEHEPSVKAEDISKKEDTPKEVADVAEVQPKSSVTHNAETPKVRKARSVDEGSFDITRDSKNVVESTPITIQGKEHFEGYGSVDIQKKPTDLGVSEVTRFNVGNESNGLIGALQLKNKIDFSKDFNFKVRVANNHQSNTTGADGWGFLFSKGNAEEYLTNGGILGDKGLVNSGGFKIDTGYIYTSSMDKTEKQAGQGYRGYGAFVKNDSSGNSQMVGENIDKSKTNFLNYADNSTNTSDGKFHGQRLNDVILTYVASTGKMRAEYAGKTWETSITDLGLSKNQAYNFLITSSQRWGLNQGINANGWMRTDLKGSEFTFTPEAPKTITELEKKVEEIPFKKERKFNPDLAPGTEKVTREGQKGEKTITTPTLKNPLTGVIISKGEPKEEITKDPINELTEYGPETIAPGHRDEFDPKLPTGEKEEVPGKPGIKNPETGDVVRPPVDSVTKYGPVKGDSIVEKEEIPFEKERKFNPDLAPGTEKVTREGQKGEKTITTPTLKXPLTGVIISKGESKEEITKDPINELTEFGGEKIPQGHKDIFDPNLPTDQTEKVPGKPGIKNPDTGKVIEEPVDDVIKHGPKTGTPETKTVEIPFETKREFNPKLQPGEERVKQEGQPGSKTITTPITVNPLTGEKVGEGQPTEEITKQPVDKIVEFGGEKPKDPKGPENPEKPSRPTHPSGPVNPNNPGLSKDRAKPNGPVHSMDKNDKVKKSKIAKESVANQEKKRAELPKTGLESTQKGLIFSSIIGIAGLMLLALRRKN

SEQ ID NO: 7455 - DNA, 1410 bp, Staphylococcus aureus
  misc_feature (16)..(16): n is a, c, g or t
atggcaagaaaattgnatagagagttgaataacagacacatccaattaatagcaattgggggcgcaattggaactgggttattcctaggatcaggtcaaacaatatctttaactggtccatcactgttattcacatacatgattattggggttgtactattcgcttttatgcgcgcattaggcgaattgttgttgagcaatacaagatttaattcatttgttgatattgcaaatgaatatttaggcccttttggtggctttgtcattggctggacttactggttatgttggattgtatcaagtatgtcagacctaactgcgatgggacaatactttgcattttggtatccacaagtcccaaattggattaccgtgctatttattgttttaatcttgattagcttcaacttattaggtgccagattatttggtgaactggagttttggttctcgattattaaagttgtcacaattattgcgatggttatcgttggtcttgtattaatctttttctcatttaaaacacattatggacatgcatcattcacaaacttaatcagtcacggtggcatgttccctggtggaacatttggtttcttaatgtcattccaaattgctgtatattcattcattggtattgaacttataggtgtaactgctggtgaaacgaaagatcctgaaaaaaccttaccgaaagcaattaataatgtacctatccgtattttattattctatatcggtggtctattagtaattatgtcagtcataccttggaatgatatcgatccaaatagtagccctttcgttaaactctttacattaatcggcgtaccatttgcagcaggtgtcgttaactttgtcgtgctaactgccgcggcctctgctacaaatagtggtatctattcgaatagtcgtatcttattcggactgtcacaacaagggttaggtcctaaagttttaaataaaacgaatagtcatggcgtgccttatttatcaatgttagtttcatcaattgcattacttatagcagccttgttaaactacattttccctaatgcaattcaactattcatatacgttacaacgttatcaactgtgttgtttttagttgtttgggcaatgattattgtcgcttatctaatgtatttgaaaaagcatcctgaggcacataaaaacagtaaatttaagttgattggtggtaagcctattgcttacattattctagcgttcttcttctttgtattcattttattattctttagtgacgaaacaagagcagctatttatatttcgccattctggtttatatttttatttttcttttataaaaaatacaaaacgaatgctgaaaagctcgcgtatgaacaacgacaaaatgacagcggtcatttcagatatgacaatcaataa

SEQ ID NO: 7456 - protein, 469 aa, Staphylococcus aureus
  misc_feature (6)..(6): Xaa can be any naturally occurring amino acid
MARKLXRELNNRHIQLIAIGGAIGTGLFLGSGQTISLTGPSLLFTYMIIGVVLFAFMRALGELLLSNTRFNSFVDIANEYLGPFGGFVIGWTYWLCWIVSSMSDLTAMGQYFAFWYPQVPNWITVLFIVLILISFNLLGARLFGELEFWFSIIKVVTIIAMVIVGLVLIFFSFKTHYGHASFTNLISHGGMFPGGTFGFLMSFQIAVYSFIGIELIGVTAGETKDPEKTLPKAINNVPIRILLFYIGGLLVIMSVIPWNDIDPNSSPFVKLFTLIGVPFAAGVVNFVVLTAAASATNSGIYSNSRILFGLSQQGLGPKVLNKTNSHGVPYLSMLVSSIALLIAALLNYIFPNAIQLFIYVTTLSTVLFLVVWAMIIVAYLMYLKKHPEAHKNSKFKLIGGKPIAYIILAFFFFVFILLFFSDETRAAIYISPFWFIFLFFFYKKYKTNAEKLAYEQRQNDSGHFRYDNQ

SEQ ID NO: 7457 - DNA, 1410 bp, Staphylococcus aureus
  misc_feature (999)..(999): n is a, c, g or t
atggcaagaaaattgcatagagagttgaataacagacacatccaattaatagcaattgggggcgcaattggaactgggttattcctaggatcaggtcaaacaatatctttaactggtccatcactgttattcacatacatgattattggggttgtactattcgcttttatgcgcgcattaggcgaattgttgttgagcaatacaagatttaattcatttgttgatattgcaaatgaatatttaggcccttttggtggctttgtcattggctggacttactggttatgttggattgtatcaagtatgtcagacctaactgcgatgggacaatactttgcattttggtatccacaagtcccaaattggattaccgtgctatttattgttttaatcttgattagcttcaacttattaggtgccagattatttggtgaactggagttttggttctcgattattaaagttgtcacaattattgcgatggttatcgttggtcttgtattaatctttttctcatttaaaacacattatggacatgcatcattcacaaacttaatcagtcacggtggcatgttccctggtggaacatttggtttcttaatgtcattccaaattgctgtatattcattcattggtattgaacttataggtgtaactgctggtgaaacgaaagatcctgaaaaaaccttaccgaaagcaattaataatgtacctatccgtattttattattctatatcggtggtctattagtaattatgtcagtcataccttggaatgatatcgatccaaatagtagccctttcgttaaactctttacattaatcggcgtaccatttgcagcaggtgtcgttaactttgtcgtgctaactgccgcggcctctgctacaaatagtggtatctattcgaatagtcgtatcttattcggactgtcacaacaagggttaggtcctaaagttttaaataaaacgaatagtcatggcgtgccttatttatcaatnttagtttcatcaattgcattacttatagcagccttgttaaactacattttccctaatgcaattcaactattcatatacgttacaacgttatcaactgtgttgtttttagttgtttgggcaatgattattgtcgcttatctaatgtatttgaaaaagcatcctgaggcacataaaaacagtaaatttaagttgattggtggtaagcctattgcttacattattctagcgttcttcttctttgtattcattttattattctttagtgacgaaacaagagcagctatttatatttcgccattctggtttatatttttatttttcttttataaaaaatacaaaacgaatgctgaaaagctcgcgtatgaacaacgacaaaatgacagcggtcatttcagatatgacaatcaataa

SEQ ID NO: 7458 - protein, 469 aa, Staphylococcus aureus
  misc_feature (333)..(333): Xaa can be any naturally occurring amino acid
MARKLHRELNNRHIQLIAIGGAIGTGLFLGSGQTISLTGPSLLFTYMIIGVVLFAFMRALGELLLSNTRFNSFVDIANEYLGPFGGFVIGWTYWLCWIVSSMSDLTAMGQYFAFWYPQVPNWITVLFIVLILISFNLLGARLFGELEFWFSIIKVVTIIAMVIVGLVLIFFSFKTHYGHASFTNLISHGGMFPGGTFGFLMSFQIAVYSFIGIELIGVTAGETKDPEKTLPKAINNVPIRILLFYIGGLLVIMSVIPWNDIDPNSSPFVKLFTLIGVPFAAGVVNFVVLTAAASATNSGIYSNSRILFGLSQQGLGPKVLNKTNSHGVPYLSXLVSSIALLIAALLNYIFPNAIQLFIYVTTLSTVLFLVVWAMIIVAYLMYLKKHPEAHKNSKFKLIGGKPIAYIILAFFFFVFILLFFSDETRAAIYISPFWFIFLFFFYKKYKTNAEKLAYEQRQNDSGHFRYDNQ

SEQ ID NO: 7459 - DNA, 1212 bp, Staphylococcus aureus
  misc_feature (307)..(307): n is a, c, g or t
atgcaatcaacgaaaaccaaaacgaagcatttttcatttttattgctaattacgttaggcgtcatgaccgcttttggcccactaactatagatatgtacgtaccatcattacctaaagtgcaaggtgattttggttctactacatcagaaattcaattaacattatcattcacaatgattggtcttgcactaggccaatttatctttggacctttatccgatgcttttggtcgcaaacggattgctgtatccattttgatcattttcattttggtatcaggtttgtctatgtttgttgatcaattgncattattcttaactttacgatttattcaaggtttaactggtggtggcgtcatcgtgattgcaaaagcctctgctggtgataaatttagtggcaacgcactcgctaaatttttagcatctttaatggtagttaatggcatcatcactattcttgcaccattagccggtggattagctttatccgtagcaacatggcgttctattttcacaattttaactattgtggcactcatcattttaattggcgtcgcttctcaattacctaaaacatctaaagatgaattaaagcaggtgaattttagtagcgtcattaaagattttggaagtcttttgaaaaaaccagcatttattattccaatgctattacaaggtttaacttatgtaatgctatttagttattcatctgcatcgccatttattactcaaaaattgtataatatgacaccccaacaatttagtatcatgtttgctgttaacggtgtaggtttaatcattgtcagtcaagtcgttgctttattagtagaaaaattacatcgccacatattattaatcattttaactattatacaagtggtaggtgttgctttaattatcctgacacttacattccatttaccactttgggtcttactcatcgcattcttcttaaatgtgtgtcctgtgacgtcaattggaccgcttggtttcacaatggctatggaagaacgaacaggtggcagtggtaacgcatcaagtttacttggcttattccaatttatcttaggtggcgctgttgcaccattagttggcttaaaaggcgaatttaatacatcaccatatatgattattatcttcattacagccattctattagtcagtctacaaatcatttactttaaaatgattaaaaagcaacatgtcgcataa

SEQ ID NO: 7460 - protein, 403 aa, Staphylococcus aureus
  misc_feature (103)..(103): Xaa can be any naturally occurring amino acid
MQSTKTKTKHFSFLLLITLGVMTAFGPLTIDMYVPSLPKVQGDFGSTTSEIQLTLSFTMIGLALGQFIFGPLSDAFGRKRIAVSILIIFILVSGLSMFVDQLXLFLTLRFIQGLTGGGVIVIAKASAGDKFSGNALAKFLASLMVVNGIITILAPLAGGLALSVATWRSIFTILTIVALIILIGVASQLPKTSKDELKQVNFSSVIKDFGSLLKKPAFIIPMLLQGLTYVMLFSYSSASPFITQKLYNMTPQQFSIMFAVNGVGLIIVSQVVALLVEKLHRHILLIILTIIQVVGVALIILTLTFHLPLWVLLIAFFLNVCPVTSIGPLGFTMAMEERTGGSGNASSLLGLFQFILGGAVAPLVGLKGEFNTSPYMIIIFITAILLVSLQIIYFKMIKKQHVA

SEQ ID NO: 7461 - DNA, 1488 bp, Staphylococcus aureus
  misc_feature (961)..(961): n is a, c, g or t
atggcagtaaacgttcgagattatattgcagagaattatggtttatttatcaatggggaatttgttaaaggtagcagtgacgaaacaatcgaagtgactaatccagcaactggagaaacactatcacatattacaagagcaaaagataaagatgtcgatcatgcagtcaaagtggcgcaagaggcatttgaatcatggtcattaacttctaaatcagaacgtgcacaaatgttgcgtgatattggtgataaattaatggcacaaaaagataaaattgcaatgattgaaacattaaataatggtaaaccgattcgtgagacaacagcaattgatattccatttgctgcaagacatttccattatttcgcaagtgttattgaaacagaagaaggtacagtgaatgatatcgataaagacacaatgagtatcgtacgacatgagccgattggcgtcgtaggtgctgttgttgcttggaacttcccaatgctattagctgcatggaagattgcgccagccattgctgcaggtaatacaattgtgattcaaccttcgtcttcaacaccattaagtttattggaagttgctaaaattttccaagaggtattacctaaaggtgttgtcaatatactaacgggtaaaggttcagaatcaggtaatgcaattttcaatcatgatggtgtagataaattatcatttacgggctcaactgatgtaggttatcaagttgccgaagctgcagcaaaacatctagtacccgctacattagagcttggtggtaaaagcgccaatatcatattagatgatgctaatttagaccttgcagttgaaggtattcagttaggtattttattcaaccaaggtgaagtatgtagtgcaggttctcgattattagttcatgaaaaaatttatgatcaattggtgccacgtttacaagaggcattttcaaatattaaagttgganatccacaagatgaagctacacaaatgggtagtcaaactggtaaggatcaattagataaaattcaatcatatattgatgcagcaaaagaatcagatgcacaaattttagcaggcggtcatcgcttaactgaaaatggattagataaagggttcttctttgagccgacattaattgctgtgccagacaatcatcacaaattagcacaagaagaaatatttggaccagtgttaacagtgattaaagtgaaggacgatcaagaagcaattgatatagctaatgattctgagtatggtttagcaggcggtgtattttctcaaaatatcacacgtgcattaaatattgctaaagctgtacgtacaggacgtatttggattaacacttacaaccaagtaccagaaggcgcaccatttggtggttataaaaaatcaggtatcggtcgagaaacttataaaggtgcgttaagtaactatcaacaagttaaaaatatttatattgatacaagcaatgctttaaaaggtttgtactag

SEQ ID NO: 7462 - protein, 495 aa, Staphylococcus aureus
  misc_feature (321)..(321): Xaa can be any naturally occurring amino acid
MAVNVRDYIAENYGLFINGEFVKGSSDETIEVTNPATGETLSHITRAKDKDVDHAVKVAQEAFESWSLTSKSERAQMLRDIGDKLMAQKDKIAMIETLNNGKPIRETTAIDIPFAARHFHYFASVIETEEGTVNDIDKDTMSIVRHEPIGVVGAVVAWNFPMLLAAWKIAPAIAAGNTIVIQPSSSTPLSLLEVAKIFQEVLPKGVVNILTGKGSESGNAIFNHDGVDKLSFTGSTDVGYQVAEAAAKHLVPATLELGGKSANIILDDANLDLAVEGIQLGILFNQGEVCSAGSRLLVHEKIYDQLVPRLQEAFSNIKVGXPQDEATQMGSQTGKDQLDKIQSYIDAAKESDAQILAGGHRLTENGLDKGFFFEPTLIAVPDNHHKLAQEEIFGPVLTVIKVKDDQEAIDIANDSEYGLAGGVFSQNITRALNIAKAVRTGRIWINTYNQVPEGAPFGGYKKSGIGRETYKGALSNYQQVKNIYIDTSNALKGLY

SEQ ID NO: 7463 - DNA, 1035 bp, Staphylococcus aureus
  misc_feature (667)..(667): n is a, c, g or t
atgatgactttagaaacgcttatcaaagaacaattagatcctcatttagtagaagttgatgaagggacgtattatccgagaacatttattcagcaattatttgtagatggttatttcggtgaggcggcattgagaaaaaatgctgaagtaatcgaagctgtatcgcagtcttgtttgacaacaggattttgtttatggtgccaattagctttttcaacgtatttagaaaatgccacgcagccacatttaaataatgacttacaacagcaattgttatctggagaaatattaggtgctaccggattgtctaatccgatgaagtcatttaatgatttagaaaagttgaaccttgaacacacttatgttgatggacaattggttgtcagtggacgtatgccagctgtaagtaatattcaagaagaccattattttggtgcgatttcgaaacatgaatcatcagatgaatttgtcatgttcattctacgtgccaatcaagatggtatcactcttgttgaaaaaaccaattttttaggagtcaacgggtcagcaacgtatcaaatcacattgaatcaagtcgtagtgccacaatcacaaattatcacgcatgatgcgaagcagtttgcagcaactattcgcccgcaatttattgcttaccaaattccaatangattaggctcaattaaaagttctttagagttaattgatgcattttcaaatgtgcaaaacggaataaatcaatatttagagtatgatgttgaagcttttaaaaaacgttatcgtcaacttagagaggaatattatgcaatattagatgacggtaacttaacttcacatttaaatgaattaatatcattgaagaaggacatcggctatttattgttagatgtaaatcaagcttctgttgtcaatggtggttctagagcgtacacaccatattcgccacaagttcgcaagttaaaagaaggattcttcttcgcagcattgacaccgacattaagacatttaggtaaacttgaagcagagttgaaggggtaa

SEQ ID NO: 7464 - protein, 344 aa, Staphylococcus aureus
  misc_feature (223)..(223): Xaa can be any naturally occurring amino acid
MMTLETLIKEQLDPHLVEVDEGTYYPRTFIQQLFVDGYFGEAALRKNAEVIEAVSQSCLTTGFCLWCQLAFSTYLENATQPHLNNDLQQQLLSGEILGATGLSNPMKSFNDLEKLNLEHTYVDGQLVVSGRMPAVSNIQEDHYFGAISKHESSDEFVMFILRANQDGITLVEKTNFLGVNGSATYQITLNQVVVPQSQIITHDAKQFAATIRPQFIAYQIPIXLGSIKSSLELIDAFSNVQNGINQYLEYDVEAFKKRYRQLREEYYAILDDGNLTSHLNELISLKKDIGYLLLDVNQASVVNGGSRAYTPYSPQVRKLKEGFFFAALTPTLRHLGKLEAELKG

SEQ ID NO: 7465 - DNA, 1035 bp, Staphylococcus aureus
  misc_feature (11)..(11): n is a, c, g or t
atgatgattanagtaggtatcgttggcggtagcggttatggcgcaattgaattaattcgattgttacaaacacatcctcatgtaacgattgcacacatctactcacattcaaaagtagatgaaccgttgaaattaacatttccacatttacaacatattatgcaacatttcgaagcacttacagtggacaataatgactgtgatgtaattttctttgcgacaccagcacccgtaagtaaaacatgtatccctcccttagtagaaaaaggtattcatgttatcgatttatctggcgcatttagaattaagaatcgtgaaatatatgaagcatattacaaagaaactgctgcagcacaagatgatttgaatcatgctatttacagcatttcagaatggcaatcgtttgataacaatggaacgaagctcatttctaatcctggctgtttccctacagcaacattattagcattacatccacttattagcgaaaaaatagtagatttgtcatctattattattgatgctaagaccggcgtgtcaggtgctggtcgttcattatcacaacgtgttcatttttcagaaatgaatgaaaatctaagcgcttatgcaatcggaaaccataaacacaaaccggaaatcgagcaatatttatctatcattgcgggtcaagatgtatcagtcatatttacaccacatctcgtaccaatgacacgaggtattttatcaacaatatatgtcaaattatcatctgaatatacgactgaatcattacataaattaatgacctcttattatgctaatcagccatttgtcagaattagagatattgggacttttccaaccacaaaagaagtactcggtagtaactactgcgatatcggcatctatgtagatgaaacaacgcaaacagcaattttagtatcagtgattgataaccttgtcaaaggcgcaagtgggcaagccattcaaaatttaaatatattatatgattttgaagtgacgactggcctaaatcaatcaccagtttatccataa

SEQ ID NO: 7466 - protein, 344 aa, Staphylococcus aureus
  misc_feature (4)..(4): Xaa can be any naturally occurring amino acid
MMIXVGIVGGSGYGAIELIRLLQTHPHVTIAHIYSHSKVDEPLKLTFPHLQHIMQHFEALTVDNNDCDVIFFATPAPVSKTCIPPLVEKGIHVIDLSGAFRIKNREIYEAYYKETAAAQDDLNHAIYSISEWQSFDNNGTKLISNPGCFPTATLLALHPLISEKIVDLSSIIIDAKTGVSGAGRSLSQRVHFSEMNENLSAYAIGNHKHKPEIEQYLSIIAGQDVSVIFTPHLVPMTRGILSTIYVKLSSEYTTESLHKLMTSYYANQPFVRIRDIGTFPTTKEVLGSNYCDIGIYVDETTQTAILVSVIDNLVKGASGQAIQNLNILYDFEVTTGLNQSPVYP

SEQ ID NO: 7467 - DNA, 1764 bp, Staphylococcus aureus
  misc_feature (1228)..(1228): n is a, c, g or t
atgaagagaattagtaaagatatatgggcagtatttaaattactgtatcaaaataaagggcgttttagcattaatgccttactattgcagttaatcatgatttttattagtagtacatacttaattttactatttaatatgatgttaaaagtagctgggcaaagccaacttacgattaacaattggacggaaatcgttagtcatcccgccagtgtgatacttcttattatattcatattaagtgttgcctttctgatttatgtagagttttcattgttagtttatatggtttatgccggctttgatcgacagattattacatttaaatccatttttaaaaatgcctttgtaaatgtgcgtaaactcataggtgtaccagttattttctttgtcatttatttaatgttaatgatacccattgccaacctaggactaagttcagtattaacaaaaaatatttacatacctaaatttttaacggaagaacttatgaaaacgacgaaaggtataatcatttacggtacctttatgattgctgtatttatattaaattttaaattaatatttactctaccgttaacgattttaaaccgccagtcgttatttaaaaatatgagactaagttggcaaattacgaagcgaaataagtttcggcttgttatagaaatagttatattagaactcatcattggtgcgattttaacattaattatttcaggagcaacatatcttgctatttgtgtagatgaagaaggagataagtttttagtctcatcaattttatttgttgtattgaaaagcgcattgttcttctattatttatttacgaaattatcattaatcagtgtgttagtactgcacttaaaacaagagaatgtattagaccaaccgggcttagaatttaaatatccaaaaccgaaacggaagtctaggttctttataatttcaatggtgcttgcagtgacatgttttatcggttataacatgtacttactttacaataatactatcaatacaaatatctccattattggccatcgtggtttcgaagataaaggcgttgaaaattctattccgtcattgaaagctgctgcaaaagcgaatgtcgaatacgttgagttagatacaattatgacgaaagataaacaatttgttgttagtcatgataacaatttgaaacgtttaacaggtgttaataaaaatatttctgaatctaatttcaaagatntcgtcggtttgaaaatgcgtcaaaatggacatgaagcaaaatttgtatccttagacgaatttattgaaacggctaaacaatcaaatgtgaagctactagtagagttaaagccacatggtaaagaaccagcagattatacacaacgtgttattgatattttgaaaaagcatggtgttgaacatcaatatcgtgtgatgtctttggattatgatgtgatgactaagttgaaaaaagaagcgccatatctcaagtgtggttatatcattccgttgcagtttggtcattttaaagaaacatcattagatttctttgtcatcgaagatttttcttattcgccaagacttgttaatcaagcgcacttggaaaataaagaagtctatacttggactattaacggcgaagaagatttaacgaaatacttacaaaccaatgttgatggtattatcacagatgacccagcattagctgatcagattaaagaagaaaagaaagacgaaacatacttcgatcgttctataagaattttgtttgaataa

SEQ ID NO: 7468 - protein, 587 aa, Staphylococcus aureus
  misc_feature (410)..(410): Xaa can be any naturally occurring amino acid
MKRISKDIWAVFKLLYQNKGRFSINALLLQLIMIFISSTYLILLFNMMLKVAGQSQLTINNWTEIVSHPASVILLIIFILSVAFLIYVEFSLLVYMVYAGFDRQIITFKSIFKNAFVNVRKLIGVPVIFFVIYLMLMIPIANLGLSSVLTKNIYIPKFLTEELMKTTKGIIIYGTFMIAVFILNFKLIFTLPLTILNRQSLFKNMRLSWQITKRNKFRLVIEIVILELIIGAILTLIISGATYLAICVDEEGDKFLVSSILFVVLKSALFFYYLFTKLSLISVLVLHLKQENVLDQPGLEFKYPKPKRKSRFFIISMVLAVTCFIGYNMYLLYNNTINTNISIIGHRGFEDKGVENSIPSLKAAAKANVEYVELDTIMTKDKQFVVSHDNNLKRLTGVNKNISESNFKDXVGLKMRQNGHEAKFVSLDEFIETAKQSNVKLLVELKPHGKEPADYTQRVIDILKKHGVEHQYRVMSLDYDVMTKLKKEAPYLKCGYIIPLQFGHFKETSLDFFVIEDFSYSPRLVNQAHLENKEVYTWTINGEEDLTKYLQTNVDGIITDDPALADQIKEEKKDETYFDRSIRILFE

SEQ ID NO: 7469 - DNA, 1185 bp, Staphylococcus aureus
  misc_feature (101)..(101): n is a, c, g or t
atgcaagaagcatacattgtagcttatgggcgttcagccgcagcgaaagcaaagcaaggcgcattattccacgaaagacctgatgatgtcgcagccaaagnattacaaggcgtattgaaacgtattgacggaaaattcaataagaatatgattgaagatgtcattgttggtacggcttttccagaaggattacaaggccaaaacattgcacgaacgattgcattgcgtgcgggattatctgacacggtaccgggtcaaacagtgaatcgctactgctcatcaggattacaaaccatcgcgattgcagccaatcaaattatggctggtcaaggagatatacttgtagctggtggcgttgaattgatgagtgccgtaccaatgggtggcaacgagcccacaaacaatccaaccttacaatatgatgatataggtgcgtcatatcctatgggtttaactgctgaaaatgtagcatcccaatttgacgtatcacgcgaagatcaagatgcttatgctgtcagaagtcatcaacgtgcctatgacgcacaacgtgatggtcggttcaaagatgaaattattccaatacaagtaaactcagttgaatatacaaacgcaggaccaaaagtacacacaaatatctttgaccaagatgaatttatacgccctgacaccacgatggaggcattagccaaattacgtacagtatttaaagctgacggcactgtgactgcaggaacatctgccccactttctgatggtgcaggatttgtagttttaatgtctggagataaagtgaaagaactcggcgtgacacctattgcacgattcgttggttttaaggcagtaggcgttgacccgaaaattatgggtattgggcctgcatatgcgattcctgaagtattgtcactcagcaatctatctgttgaagacattgatttgatcgaattgaacgaagcatttgcttctcaaacgattgcatctattaaagaagtaggtctagatatatcacgtacgaatgtgaatggtggcgctattgctttaggtcatccattaggtgctacaggcgcaatgttaaccgcgcgtttacttaatgaaatgggtagacgtcccgatagccgttacggcatggttacgatgtgtattggtgtcggcatgggtgcagctgctatatttgaatatgtgcgttag

SEQ ID NO: 7470 - protein, 394 aa, Staphylococcus aureus
  misc_feature (34)..(34): Xaa can be any naturally occurring amino acid
MQEAYIVAYGRSAAAKAKQGALFHERPDDVAAKXLQGVLKRIDGKFNKNMIEDVIVGTAFPEGLQGQNIARTIALRAGLSDTVPGQTVNRYCSSGLQTIAIAANQIMAGQGDILVAGGVELMSAVPMGGNEPTNNPTLQYDDIGASYPMGLTAENVASQFDVSREDQDAYAVRSHQRAYDAQRDGRFKDEIIPIQVNSVEYTNAGPKVHTNIFDQDEFIRPDTTMEALAKLRTVFKADGTVTAGTSAPLSDGAGFVVLMSGDKVKELGVTPIARFVGFKAVGVDPKIMGIGPAYAIPEVLSLSNLSVEDIDLIELNEAFASQTIASIKEVGLDISRTNVNGGAIALGHPLGATGAMLTARLLNEMGRRPDSRYGMVTMCIGVGMGAAAIFEYVR

SEQ ID NO: 7471 - DNA, 2097 bp, Staphylococcus aureus
  misc_feature (1375)..(1375): n is a, c, g or t
atgaacggggataatcagcaaatactcagagaaattgtattgaatcctactattcatggtaaagaacttgaatcgatatttggtttgtctcgtagacaactaggatatcgcattcaaaaaatcaatttgtggcttgaacaagagggttatccaaaacttgaaagaacaagccaaggaaattttattgtaagttctgaaatcatgacgttattcaagcgagatgtatcggagcagcaaatgttaaacggcaacaatgtcatttttagcatagaaacacgtcgttattatttaatgctcatgctttttagtaaggaaaacgcaatgtctctaaaccatttttcaattgatttacaagtcagtaaaaatactgtcattcacgatataaatcatgtgaaagagcaattggaaaatcatggtttgtcacttaagtattctcgaaaacatggttatgaaattgttggtgatgaatttgaagttcgccgtttcttcattaagttgattgatcaaaggttgaatcatgatattactaaaagtgaagttttaaaggcgctcaacttaacattcgaagatatcgcatatcaaaaagacaagatcaaacaggtagaacaatttttgaagagtcgctttatagacaaatcacttagttcattgccttatgtcctttgtgtgattcgtagacgaattcaaagtggtcatgtgatgaatccattaaatattaattatcagtatttgagggatacgaaagaatatcaagcaacggagattatgacgcaacatgagccggatttgccagaagcggaaaagttatatttgacattacacttactttcaacaagtgtgcaatggactgatttgcaagaatcagatagcatatcgaatttaacgatggccatcgctcaaatgattcaccattttgaacaaatcacttttattaacattgaagataaggagaaattatcacagcaactcttgttacatttaacgcctgctttttataggattaaatataacttaacggatcgtgatgaattaataaatcctttacaaggaaattatcaatccttatttcatatggtgaaacaatcatgtcaatcgttaactgaatatttcggaaaatcgttgcctgataatgaaatagcatatttaaccatgttgttcggaggtagtttgagacgtcaagatgaaaacttcgatggcaagataaaagctattatcgtgtgtacacaaggcacgtcagtatcacaaatgatgttatacgagttgcgaaacttatttccagaaattattttcttagatgcgatttcacttagaacatttgaaaattacacattagattatgacatcgtcttttcaccaatgtttgtcctaacacatnaaaaattatttatcacaaaagtagctttatctgaaaatgagcaacgaaagttacgtaaagaagtgatgaagtacattaataaggaatcggctgacattgataaggaaataaacaagttaatggcattaattgaacgcacaacgacagttaatgacattacagaactacgtgatggtttagaagattttattgccaattataattcaatttcaaccattaatggatcgattgtcacacaaaataagacattagatttagctgacttgataccggcaaggcacgtgaaaagaatgcatcatgttgaaaatattgatgaagctattgctaaagcaagtgatgtgttagttgctaatcattttattgatattaaatatattcatgagatgcaacaggtatttgatgattcgtatatggttatcatgcaaaatattgctattccacatgcatactctgaaaagcatgtacataaaacagcgatgagtatgttgatattacaagaaccaatatacatgtcagatggcacagcaatccatattattgtacctattgctgctgttgataaagtgacacacttaagagcgttactacaattgagagatgtggcgcaagacaatgacgcaattaagcgcatcatacaaagtcgcaaaaattctgatgtaaatgagattttaaaaaattattcaaataaagaagcgagggaaaatggatgggacagcaattag

SEQ ID NO: 7472 - protein, 698 aa, Staphylococcus aureus
  misc_feature (459)..(459): Xaa can be any naturally occurring amino acid
MNGDNQQILREIVLNPTIHGKELESIFGLSRRQLGYRIQKINLWLEQEGYPKLERTSQGNFIVSSEIMTLFKRDVSEQQMLNGNNVIFSIETRRYYLMLMLFSKENAMSLNHFSIDLQVSKNTVIHDINHVKEQLENHGLSLKYSRKHGYEIVGDEFEVRRFFIKLIDQRLNHDITKSEVLKALNLTFEDIAYQKDKIKQVEQFLKSRFIDKSLSSLPYVLCVIRRRIQSGHVMNPLNINYQYLRDTKEYQATEIMTQHEPDLPEAEKLYLTLHLLSTSVQWTDLQESDSISNLTMAIAQMIHHFEQITFINIEDKEKLSQQLLLHLTPAFYRIKYNLTDRDELINPLQGNYQSLFHMVKQSCQSLTEYFGKSLPDNEIAYLTMLFGGSLRRQDENFDGKIKAIIVCTQGTSVSQMMLYELRNLFPEIIFLDAISLRTFENYTLDYDIVFSPMFVLTHXKLFITKVALSENEQRKLRKEVMKYINKESADIDKEINKLMALIERTTTVNDITELRDGLEDFIANYNSISTINGSIVTQNKTLDLADLIPARHVKRMHHVENIDEAIAKASDVLVANHFIDIKYIHEMQQVFDDSYMVIMQNIAIPHAYSEKHVHKTAMSMLILQEPIYMSDGTAIHIIVPIAAVDKVTHLRALLQLRDVAQDNDAIKRIIQSRKNSDVNEILKNYSNKEARENGWDSN

SEQ ID NO: 7473 - DNA, 1170 bp, Staphylococcus aureus
  misc_feature (452)..(452): n is a, c, g or t
atgattaaaaatacaattaaaaaattgatagaacatagtatatatacgacttttaaattactatcaaaattgccaaacaagaatctaatttattttgaaagctttcatggtaaacaatacagcgacaaccccaaagcattatatgaatacttaactgaacatagcgatgcccaattaatatggggtgtgaaaaaaggatatgaacacatattccaacagcacaatgtaccatatgttacaaagttttcaatgaaatggtttttagcgatgccaagagcgaaagcgtggatgattaacacacgtacaccagattggttatataaatcaccgcgaacgacgtacttacaaacatggcatggcacgccattaaaaaagattggtttggatattagtaacgttaaaatgctaggaacaaatactcaaaattaccaagatggctttaaaaaagaaanccaacggtgggattatctagtgtcacctaatccatattcgacatcgatatttcaaaatgcatttcatgttagtcgagataagattttggaaacaggttatccaagaaatgataaattatcacataaacgcaatgatactgaatatattaatggtattaagacaagattaaatattccattagataaaaaagtgattatgtacgcgccaacttggcgtgacgatgaagcgattcgagaaggttcatatcaatttaatgttaactttgatatagaagctttgcgtcaagcgctggatgatgattatgttattttattacgcatgcattatttagttgtgacacgtattgatgaacatgatgattttgtgaaagacgtttcagattatgaagacatttcggatttatacttaatcagcgatgcgttagttaccgactactcatctgtcatgttcgacttcggtgtattaaagcgtccgcaaattttctatgcatatgacttagataaatatggcgatgagcttagaggtttttacatggattataaaaaagagttgccaggtccaattgttgaaaatcaaacagcactcattgatgcattaaaacaaatcgatgagactgcaaatgagtatattgaagcacgaacggtattttatcaaaaattctgttcattagaagatggacaagcgtcacaacgaatttgccaaacgatttttaagtga

SEQ ID NO: 7474 - protein, 389 aa, Staphylococcus aureus
  misc_feature (151)..(151): Xaa can be any naturally occurring amino acid
MIKNTIKKLIEHSIYTTFKLLSKLPNKNLIYFESFHGKQYSDNPKALYEYLTEHSDAQLIWGVKKGYEHIFQQHNVPYVTKFSMKWFLAMPRAKAWMINTRTPDWLYKSPRTTYLQTWHGTPLKKIGLDISNVKMLGTNTQNYQDGFKKEXQRWDYLVSPNPYSTSIFQNAFHVSRDKILETGYPRNDKLSHKRNDTEYINGIKTRLNIPLDKKVIMYAPTWRDDEAIREGSYQFNVNFDIEALRQALDDDYVILLRMHYLVVTRIDEHDDFVKDVSDYEDISDLYLISDALVTDYSSVMFDFGVLKRPQIFYAYDLDKYGDELRGFYMDYKKELPGPIVENQTALIDALKQIDETANEYIEARTVFYQKFCSLEDGQASQRICQTIFK

SEQ ID NO: 7475 - DNA, 1437 bp, Staphylococcus aureus
  misc_feature (293)..(293): n is a, c, g or t
atgacaaaattaccgcaaaatttcatgtggggtggcgctcttgccgcaaatcaatttgaaggtggatatgataaaggtggtaaagggttaagtgtaattgatgttatgacgagtggtgcacatggcaaagcacgtcagattacagaatctatagatcccaatcactattatccaaatcatgaaggtattgatttttatcatcgttataaggaagatattgccttgtttaaagaaatgggattgaaatgtttacgtacgtcgattgcgtggacacgtatctttccgaatggggntgaagatgtgccaaatgaagaaggactcgccttttatgatcgtatctttgatgaattaattgcacaaggtattgaacctgttgtgacgttatcacattttgagatgccacttcatttagcgaaacattatggtggatttagaaatagagaagttgtcgattattttgtgcattttgcgcgtgttgtatttgaaagatataaagataaagttacatattggatgacgtttaatgaaattaataatcagatggacacatcaaatcctatctttttatggacgaattctggggtagcattgacagaaaatgataatcctgaagaagtcttgtatcaagtagcacatcatgaacttttagccagtgctttagcagttcgtcttggtaaagagattaatccgaagtttaagattggaacaatgatttcacatgtacccatttatccatattcgtgtcatccgaaagatatgatggaagcacaaattgcgaatcgcttacgtttctttttcccggatgtccaagtgagaggttattatccaagctatgctaaaaaaatgttggcacgaaaaggatatgatgttggatggcaagaaggggacgacagtattttacagcagggcacggttgattatattggctttagttattacatgtctacggctgtaaaacatgatgttgatactacagttgaaaacaacatcgtcaacggtggtttgaatcattctgtggagaatccgcatatcgcaacgagtgattggggttgggcgattgatccagatggcttaagatatacattgaatgtgttatatgatcgttatcagttaccactttttattgtggaaaatggttttggtgcagttgatgaagtggtagatggacatattcatgatgattatcgcattgaatatttaaaagcacatattacagcagcgatagaagcagttgatcaagatggtgtagatttaatcggttatacaccgtggggaatcattgatattgtttcatttacaaccggtgaaatgaagaaacgctatggtttaatatatgttgatcgagataatgatggtcatggcacgatggaacgcttgaaaaaagattcgttctattggtatcaacaagtgatagcatcaaatggagataaattataa

SEQ ID NO: 7476 - protein, 478 aa, Staphylococcus aureus
  misc_feature (98)..(98): Xaa can be any naturally occurring amino acid
MTKLPQNFMWGGALAANQFEGGYDKGGKGLSVIDVMTSGAHGKARQITESIDPNHYYPNHEGIDFYHRYKEDIALFKEMGLKCLRTSIAWTRIFPNGXEDVPNEEGLAFYDRIFDELIAQGIEPVVTLSHFEMPLHLAKHYGGFRNREVVDYFVHFARVVFERYKDKVTYWMTFNEINNQMDTSNPIFLWTNSGVALTENDNPEEVLYQVAHHELLASALAVRLGKEINPKFKIGTMISHVPIYPYSCHPKDMMEAQIANRLRFFFPDVQVRGYYPSYAKKMLARKGYDVGWQEGDDSILQQGTVDYIGFSYYMSTAVKHDVDTTVENNIVNGGLNHSVENPHIATSDWGWAIDPDGLRYTLNVLYDRYQLPLFIVENGFGAVDEVVDGHIHDDYRIEYLKAHITAAIEAVDQDGVDLIGYTPWGIIDIVSFTTGEMKKRYGLIYVDRDNDGHGTMERLKKDSFYWYQQVIASNGDKL

SEQ ID NO: 7477 - DNA, 1437 bp, Staphylococcus aureus
  misc_feature (20)..(20): n is a, c, g or t
atgacaaaattaccgcaaantttcatgtggggtggcgctcttgccgcaaatcaatttgaaggtggatatgataaaggtggtaaagggttaagtgtaattgatgttatgacgagtggtgcacatggcaaagcacgtcagattacagaatctatagatcccaatcactattatccaaatcatgaaggtattgatttttatcatcgttataaggaagatattgccttgtttaaagaaatgggattgaaatgtttacgtacgtcgattgcgtggacacgtatctttccgaatggggatgaagatgtgccaaatgaagaaggactcgccttttatgatcgtatctttgatgaattaattgcacaaggtattgaacctgttgtgacgttatcacattttgagatgccacttcatttagcgaaacattatggtggatttagaaatagagaagttgtcgattattttgtgcattttgcgcgtgttgtatttgaaagatataaagataaagttacatattggatgacgtttaatgaaattaataatcagatggacacatcaaatcctatctttttatggacgaattctggggtagcattgacagaaaatgataatcctgaagaagtcttgtatcaagtagcacatcatgaacttttagccagtgctttagcagttcgtcttggtaaagagattaatccgaagtttaagattggaacaatgatttcacatgtacccatttatccatattcgtgtcatccgaaagatatgatggaagcacaaattgcgaatcgcttacgtttctttttcccggatgtccaagtgagaggttattatccaagctatgctaaaaaaatgttggcacgaaaaggatatgatgttggatggcaagaaggggacgacagtattttacagcagggcacggttgattatattggctttagttattacatgtctacggctgtaaaacatgatgttgatactacagttgaaaacaacatcgtcaacggtggtttgaatcattctgtggagaatccgcatatcgcaacgagtgattggggttgggcgattgatccagatggcttaagatatacattgaatgtgttatatgatcgttatcagttaccactttttattgtggaaaatggttttggtgcagttgatgaagtggtagatggacatattcatgatgattatcgcattgaatatttaaaagcacatattacagcagcgatagaagcagttgatcaagatggtgtagatttaatcggttatacaccgtggggaatcattgatattgtttcatttacaaccggtgaaatgaagaaacgctatggtttaatatatgttgatcgagataatgatggtcatggcacgatggaacgcttgaaaaaagattcgttctattggtatcaacaagtgatagcatcaaatggagataaattataa

SEQ ID NO: 7478 - protein, 478 aa, Staphylococcus aureus
  misc_feature (7)..(7): Xaa can be any naturally occurring amino acid
MTKLPQXFMWGGALAANQFEGGYDKGGKGLSVIDVMTSGAHGKARQITESIDPNHYYPNHEGIDFYHRYKEDIALFKEMGLKCLRTSIAWTRIFPNGDEDVPNEEGLAFYDRIFDELIAQGIEPVVTLSHFEMPLHLAKHYGGFRNREVVDYFVHFARVVFERYKDKVTYWMTFNEINNQMDTSNPIFLWTNSGVALTENDNPEEVLYQVAHHELLASALAVRLGKEINPKFKIGTMISHVPIYPYSCHPKDMMEAQIANRLRFFFPDVQVRGYYPSYAKKMLARKGYDVGWQEGDDSILQQGTVDYIGFSYYMSTAVKHDVDTTVENNIVNGGLNHSVENPHIATSDWGWAIDPDGLRYTLNVLYDRYQLPLFIVENGFGAVDEVVDGHIHDDYRIEYLKAHITAAIEAVDQDGVDLIGYTPWGIIDIVSFTTGEMKKRYGLIYVDRDNDGHGTMERLKKDSFYWYQQVIASNGDKL

SEQ ID NO: 7479 - DNA, 612 bp, Staphylococcus aureus
  misc_feature (529)..(529): n is a, c, g or t
atggagttcttattattaattgtcgtagccggactgtattatattatatatttaactgctgtgatgtattctgaaaaaatagtagtattgcctataatcatctatgccattgtgtttgtaataattggtatcacttatatctttataggcgacagctatgatcaattaacaaatttcaatgtgattttgtatatggggagtttgttttatgcatggatggctattagaaatctttggaacagaccactattactaaaatataagaacattacagatagttcaagtggaatagttaataaatctgaatacaattcagttgaaagcttacgtataaatattgaaatagctaagtataaagggattatttctttgatagtagctatagtactaacggtattaatgacattaaagtcaacacctcaaatcactgcagaaacacgtgacttaagtatctcatttttcatactcagcttatttatcattattatatttgcagtttgggatttgtttattagaattagaaaaggancgtttgcttttgttgtaataaggccaatattatttagttgttggttatttattttgaatatgattttatcaagattattataa

SEQ ID NO: 7480 - protein, 203 aa, Staphylococcus aureus
  misc_feature (177)..(177): Xaa can be any naturally occurring amino acid
MEFLLLIVVAGLYYIIYLTAVMYSEKIVVLPIIIYAIVFVIIGITYIFIGDSYDQLTNFNVILYMGSLFYAWMAIRNLWNRPLLLKYKNITDSSSGIVNKSEYNSVESLRINIEIAKYKGIISLIVAIVLTVLMTLKSTPQITAETRDLSISFFILSLFIIIIFAVWDLFIRIRKGXFAFVVIRPILFSCWLFILNMILSRLL

SEQ ID NO: 7481 - DNA, 1356 bp, Staphylococcus aureus
  misc_feature (124)..(124): n is a, c, g or t
atgaaagacgaacaattatattattttgagaaatcgccagtatttaaagcgatgatgcatttctcattgccaatgatgatagggactttattaagcgttatttatggcatattaaatatttacnttataggatttttagaagatagccacatgatttctgctatctctctaacactgccagtatttgctatcttaatggggttaggtaatttatttggcgttggtgcaggaacttatatttcacgtttattaggtgcgaaagactatagtaagagtaaatttgtaagtagtttctctatttatggtggtattgcactaggacttatcgtgattttagttactttaccattcagtgatcaaatcgcagcaattttaggggcgagaggtgaaacgttagctttaacaagtaattatttgaaagtaatgtttttaagtgcaccttttgtaattttgttcttcatattagaacaatttgcacgtgcaattggggcaccaatggtttctatgattggtatgttagctagtgtaggcttaaatattattttagatccaattttaatttttggttttgatttaaacgttgttggtgcagctttgggtactgcaatcagtaatgttgctgctgctctgttctttatcatttattttatgaaaaatagtgacgttgtgtcagttaatattaaacttgcgaaacctaataaagaaatgctttctgaaatctttaaaatcggtattcctgcatttttaatgagtatcttaatgggattcacaggattagttttaaatttatttttagcacattatggaaacttcgcgattgcaagttatggtatctcatttagacttgtgcaatttccagaacttattatcatgggattatgtgaaggtgttgtaccactaattgcatataactttatggcaaataaaggccgtatgaaagacgttatcaaagcagttatcatgtctatcggcgttatctttgttgtatgtatgagtgctgtatttacaattggacatcatatggtcggactatttactactgatcaagccattgttgagatggcgacatttattttgaaagtaacaatggcatcattattattaaatggtataggtttcttgtttactggtatgcttcaagcgactgggcaaggtcgtggtgctacaattatggccattttacaaggtgcaattatcattccagtattatttattatgaatgctttgtttggactaacaggtgtcatttggtcattattaattgctgagtcactttgtgctttagcagcaatgttaatcgtctatttattacgtgatcgtttgacagttgatacatctgaattaatagaaggttaa

SEQ ID NO: 7482 - protein, 451 aa, Staphylococcus aureus
  misc_feature (42)..(42): Xaa can be any naturally occurring amino acid
MKDEQLYYFEKSPVFKAMMHFSLPMMIGTLLSVIYGILNIYXIGFLEDSHMISAISLTLPVFAILMGLGNLFGVGAGTYISRLLGAKDYSKSKFVSSFSIYGGIALGLIVILVTLPFSDQIAAILGARGETLALTSNYLKVMFLSAPFVILFFILEQFARAIGAPMVSMIGMLASVGLNIILDPILIFGFDLNVVGAALGTAISNVAAALFFIIYFMKNSDVVSVNIKLAKPNKEMLSEIFKIGIPAFLMSILMGFTGLVLNLFLAHYGNFAIASYGISFRLVQFPELIIMGLCEGVVPLIAYNFMANKGRMKDVIKAVIMSIGVIFVVCMSAVFTIGHHMVGLFTTDQAIVEMATFILKVTMASLLLNGIGFLFTGMLQATGQGRGATIMAILQGAIIIPVLFIMNALFGLTGVIWSLLIAESLCALAAMLIVYLLRDRLTVDTSELIEG

SEQ ID NO: 7483 - DNA, 927 bp, Staphylococcus aureus
  misc_feature (602)..(602): n is a, c, g or t
atgaaaaaagtaaacagaaacattttaaatgcggtactagtcggtgctggatttttaagtagtctattaatgatcaataaaaataaagtgattactaaaaagcaaaccatccctgcttttttcaaaggcaatgcaccatatatatttgcgcatcgcggtggtatggctttaagaccagagcaaacgcaacttgcatttgactatgctaaacaattaggcgttgatggctttgaaacagatgtgagactcacaaaagatcaacagcttatcgtttttcatgacgcaactgttgatagaacgacgaacggctctggaaaagttagtgcccatacattagcagaattaaagaaattagacgcagcttatcacttcaaagatatcaatggactaacaccatatcgtggtcatgcacacacagctatactaaccttcgatgagttgctgaagcaatatcctgatatgtatataaacgtagacttaaaagatgctcctgaatcctatgaaggctcaatcgcaccacaaattatgtttgatacaattgcagaaaatcaagcatttgaccgcgttcttgtgacaagtttttataaagaacaaatcgttcnttttaataaaattgcacaaggatccgtcgcaattggtgctagccaacaggaagttacagaagcatttttaaaatatcatttattaggtggtaggtactaccaaccattagcacaaacgttccaaatgcctactcattttaaaggcattgatttgacttcatctcgttttatcaaatggttaaatgatatgaatatcattccaggctattatggcgtaaatagtataaatctgatgaatgatttataccaaaaaggtgcacacacgattgtgacagatcgaccagatttagcacaacaattcaaacaaacaatcccgaataaataa

SEQ ID NO: 7484 - protein, 308 aa, Staphylococcus aureus
  misc_feature (201)..(201): Xaa can be any naturally occurring amino acid
MKKVNRNILNAVLVGAGFLSSLLMINKNKVITKKQTIPAFFKGNAPYIFAHRGGMALRPEQTQLAFDYAKQLGVDGFETDVRLTKDQQLIVFHDATVDRTTNGSGKVSAHTLAELKKLDAAYHFKDINGLTPYRGHAHTAILTFDELLKQYPDMYINVDLKDAPESYEGSIAPQIMFDTIAENQAFDRVLVTSFYKEQIVXFNKIAQGSVAIGASQQEVTEAFLKYHLLGGRYYQPLAQTFQMPTHFKGIDLTSSRFIKWLNDMNIIPGYYGVNSINLMNDLYQKGAHTIVTDRPDLAQQFKQTIPNK

SEQ ID NO: 7485 - DNA, 3453 bp, Staphylococcus aureus
  misc_feature (623)..(623): n is a, c, g or t
ttgaaacaaataaaaaagttacttgttgctaaccgtggagaaattgcaattcgtatattcagagcggcggcagaattagacatcagcacagttgcaatttattcgaatgaagacaaaagttcattacatagatataaagcagatgaatcctatttagttggaagtgatttaggtcctgctgaaagttatttaaatattgagcgtatcattgatgtagcaaaacaagcgaatgtggatgcgattcatcctggctatggatttttaagtgaaaatgaacaatttgcgcgtcgttgtgcagaagaaggaattaaatttattggtcctcatttagaacatttagatatgtttggagataaagttaaagctcgtacaacggctatcaaggcagatttaccagttattcctggtacagacggtccaattaaatcatatgaattagcaaaagaatttgcagaagaagctggtttcccgctaatgattaaagccacaagtggtggcggcggtaaaggtatgagaatcgttcgtgaagaaagtgaattagaagatgctttccatagagcaaaatcagaagctgaaaaatcatttggtaatagtgaagtttacatagaaagatacattgatantccaaagcatattgaagtacaagtcataggtgacgaacatggaaatatcgtacacttatttgaacgtgattgttcagtacaacgtcgtcatcaaaaagttgtagaagttgcaccatcagttggattatcatcaacattacgtcaacgtatttgtgatgctgcaattcaattgatggaaaatattaaatatgtcaatgcaggtactgttgaatttctagtatctggtgacgaattcttctttatagaagttaaccctcgtgtacaagtagagcatacaattacagagatggtaacaggaattgatattgttaagacacaaattttagttgcagcaggtgccgatttatttggtgaagagattaatatgccgcaacaaaaagatattacaacattaggctatgccatccaatgtcgtattacaacagaagatccgttaaatgatttcatgccggatactggaacaatcattgcttatcgttcaagcgggggctttggtgtacgtcttgatgctggagatggtttccaaggtgctgagatatcaccttattatgattcattactcgtaaaattatctacacacgcgatatcatttaaacaagcagaagaaaaaatggtacgctcattacgagaaatgcgtattcgtggtgttaaaactaatattccattcttaattaatgtaatgaagaataaaaagttcacaagtggtgattacacaactaaatttattgaagaaacaccagaacttttcaacattcagccgtctctagatagaggtactaaaacattagaatatataggtaatgtaacaattaatggtttcccaaatgttgagaaacgtccgaaaccagactatgaattagcatcaattccaactgtatcttcaagtaaaatcgcttcatttagtggtacgaaacaattgcttgatgaagtaggtccaaaaggtgtagctgaatgggttaaaaagcaggatgatgtcttactaacagatacaacctttagagatgcacaccaatcattattagctacacgagttagaactaaggatatgattaatatcgcatccaaaacagcggacgtatttaaagatggtttctcactagaaatgtggggcggtgctacatttgatgtggcatataatttcttgaaggaaaacccatgggaacgacttgaacgtctacgtaaagctattccaaatgtattattccaaatgttgttacgtgcttcaaacgcagttggttataaaaactatcctgataatgttattcataaattcgtacaagaaagtgctaaagcaggcatagatgtctttagaattttcgattcattaaactgggtagatcaaatgaaagttgccaatgaagcagtacaagaagcgggcaaaatctcagaaggtactatttgttatacaggtgacattttaaatcctgagcgatcaaacatttatactttagagtattatgtcaaactagctaaagagttagaacgtgaaggtttccatattttagcgattaaagatatggcaggcttattaaaacctaaagccgcttacgaattgattggtgagttaaaatcagctgtagatttaccaattcatcttcacactcatgatacaagtggtaatggtttattaacatacaaacaagcaatagatgctggtgtcgatatcattgatactgctgttgcttcaatgagtggtttaacaagtcagccaagcgccaattcgttatattatgcattaaatggcttcccacgccaccttagaactgatattgaaggtatggagtcacttagtcattattggtcaactgtacgtacttattattcagactttgaaagtgatatcaaatcaccgaatactgaaatttatcaacatgaaatgcctggtggacagtattcgaatttaagtcaacaagctaaaagtttaggtttaggcgaaagatttgatgaagtcaaagatatgtatcgcagagtgaatttcttatttggtgatatcgtaaaagtaacaccatcgtctaaagtagttggtgatatggcactttatatggtacaaaatgatcttgatgaacaatccgtgattacagatggctataaattagatttcccagaatcagtagtgtcgttcttcaaaggtgaaataggacaacctgtaaatggttttaataaagatttacaagcggttattttaaaaggccaagaagcactaacagctcgtccaggtgaatatctagagccagttgattttgaaaaagtccgtgagttgcttgaagaagagcaacaaggtcctgttacggagcaagatattattagttatgtactatatccaaaagtatatgaacaatatattcaaactagaaatcaatacggaaacttatcgttacttgatacgcctacattcttctttggaatgcgtaatggtgaaacagtagaaatcgaaatcgataaaggtaaacgattaattattaaactagaaacgattagtgaaccagatgaaaatggtaatagaacgatttactatgcgatgaatggtcaagcgagacgtatttacattaaagatgaaaatgtgcatacaaatgcgaacgttaagccaaaagcagataagagtaatccaagtcatatcggtgctcaaatgccaggttcagtaactgaagtcaaggttagtgtaggtgaaactgtgaaagctaatcagccgttgctaattactgaagctatgaaaatggaaacaacaattcaagcaccatttgacggtgtgattaaacaagtaactgtaaataatggtgacacaatagcgacaggcgatttattaatcgaaattgaaaaagcaactgactaa

SEQ ID NO: 7486 - protein, 1150 aa, Staphylococcus aureus
  misc_feature (208)..(208): Xaa can be any naturally occurring amino acid
MKQIKKLLVANRGEIAIRIFRAAAELDISTVAIYSNEDKSSLHRYKADESYLVGSDLGPAESYLNIERIIDVAKQANVDAIHPGYGFLSENEQFARRCAEEGIKFIGPHLEHLDMFGDKVKARTTAIKADLPVIPGTDGPIKSYELAKEFAEEAGFPLMIKATSGGGGKGMRIVREESELEDAFHRAKSEAEKSFGNSEVYIERYIDXPKHIEVQVIGDEHGNIVHLFERDCSVQRRHQKVVEVAPSVGLSSTLRQRICDAAIQLMENIKYVNAGTVEFLVSGDEFFFIEVNPRVQVEHTITEMVTGIDIVKTQILVAAGADLFGEEINMPQQKDITTLGYAIQCRITTEDPLNDFMPDTGTIIAYRSSGGFGVRLDAGDGFQGAEISPYYDSLLVKLSTHAISFKQAEEKMVRSLREMRIRGVKTNIPFLINVMKNKKFTSGDYTTKFIEETPELFNIQPSLDRGTKTLEYIGNVTINGFPNVEKRPKPDYELASIPTVSSSKIASFSGTKQLLDEVGPKGVAEWVKKQDDVLLTDTTFRDAHQSLLATRVRTKDMINIASKTADVFKDGFSLEMWGGATFDVAYNFLKENPWERLERLRKAIPNVLFQMLLRASNAVGYKNYPDNVIHKFVQESAKAGIDVFRIFDSLNWVDQMKVANEAVQEAGKISEGTICYTGDILNPERSNIYTLEYYVKLAKELEREGFHILAIKDMAGLLKPKAAYELIGELKSAVDLPIHLHTHDTSGNGLLTYKQAIDAGVDIIDTAVASMSGLTSQPSANSLYYALNGFPRHLRTDIEGMESLSHYWSTVRTYYSDFESDIKSPNTEIYQHEMPGGQYSNLSQQAKSLGLGERFDEVKDMYRRVNFLFGDIVKVTPSSKVVGDMALYMVQNDLDEQSVITDGYKLDFPESVVSFFKGEIGQPVNGFNKDLQAVILKGQEALTARPGEYLEPVDFEKVRELLEEEQQGPVTEQDIISYVLYPKVYEQYIQTRNQYGNLSLLDTPTFFFGMRNGETVEIEIDKGKRLIIKLETISEPDENGNRTIYYAMNGQARRIYIKDENVHTNANVKPKADKSNPSHIGAQMPGSVTEVKVSVGETVKANQPLLITEAMKMETTIQAPFDGVIKQVTVNNGDTIATGDLLIEIEKATD

SEQ ID NO: 7487 - DNA, 3453 bp, Staphylococcus aureus
  misc_feature (1372)..(1372): n is a, c, g or t
ttgaaacaaataaaaaagttacttgttgctaaccgtggagaaattgcaattcgtatattcagagcggcggcagaattagacatcagcacagttgcaatttattcgaatgaagacaaaagttcattacatagatataaagcagatgaatcctatttagttggaagtgatttaggtcctgctgaaagttatttaaatattgagcgtatcattgatgtagcaaaacaagcgaatgtggatgcgattcatcctggctatggatttttaagtgaaaatgaacaatttgcgcgtcgttgtgcagaagaaggaattaaatttattggtcctcatttagaacatttagatatgtttggagataaagttaaagctcgtacaacggctatcaaggcagatttaccagttattcctggtacagacggtccaattaaatcatatgaattagcaaaagaatttgcagaagaagctggtttcccgctaatgattaaagccacaagtggtggcggcggtaaaggtatgagaatcgttcgtgaagaaagtgaattagaagatgctttccatagagcaaaatcagaagctgaaaaatcatttggtaatagtgaagtttacatagaaagatacattgataatccaaagcatattgaagtacaagtcataggtgacgaacatggaaatatcgtacacttatttgaacgtgattgttcagtacaacgtcgtcatcaaaaagttgtagaagttgcaccatcagttggattatcatcaacattacgtcaacgtatttgtgatgctgcaattcaattgatggaaaatattaaatatgtcaatgcaggtactgttgaatttctagtatctggtgacgaattcttctttatagaagttaaccctcgtgtacaagtagagcatacaattacagagatggtaacaggaattgatattgttaagacacaaattttagttgcagcaggtgccgatttatttggtgaagagattaatatgccgcaacaaaaagatattacaacattaggctatgccatccaatgtcgtattacaacagaagatccgttaaatgatttcatgccggatactggaacaatcattgcttatcgttcaagcgggggctttggtgtacgtcttgatgctggagatggtttccaaggtgctgagatatcaccttattatgattcattactcgtaaaattatctacacacgcgatatcatttaaacaagcagaagaaaaaatggtacgctcattacgagaaatgcgtattcgtggtgttaaaactaatattccattcttaattaatgtaatgaagaataaaaagttcacaagtggtgattacacaactaaatttattgaagaaacaccagaacttttcnacattcagccgtctctagatagaggtactaaaacattagaatatataggtaatgtaacaattaatggtttcccaaatgttgagaaacgtccgaaaccagactatgaattagcatcaattccaactgtatcttcaagtaaaatcgcttcatttagtggtacgaaacaattgcttgatgaagtaggtccaaaaggtgtagctgaatgggttaaaaagcaggatgatgtcttactaacagatacaacctttagagatgcacaccaatcattattagctacacgagttagaactaaggatatgattaatatcgcatccaaaacagcggacgtatttaaagatggtttctcactagaaatgtggggcggtgctacatttgatgtggcatataatttcttgaaggaaaacccatgggaacgacttgaacgtctacgtaaagctattccaaatgtattattccaaatgttgttacgtgcttcaaacgcagttggttataaaaactatcctgataatgttattcataaattcgtacaagaaagtgctaaagcaggcatagatgtctttagaattttcgattcattaaactgggtagatcaaatgaaagttgccaatgaagcagtacaagaagcgggcaaaatctcagaaggtactatttgttatacaggtgacattttaaatcctgagcgatcaaacatttatactttagagtattatgtcaaactagctaaagagttagaacgtgaaggtttccatattttagcgattaaagatatggcaggcttattaaaacctaaagccgcttacgaattgattggtgagttaaaatcagctgtagatttaccaattcatcttcacactcatgatacaagtggtaatggtttattaacatacaaacaagcaatagatgctggtgtcgatatcattgatactgctgttgcttcaatgagtggtttaacaagtcagccaagcgccaattcgttatattatgcattaaatggcttcccacgccaccttagaactgatattgaaggtatggagtcacttagtcattattggtcaactgtacgtacttattattcagactttgaaagtgatatcaaatcaccgaatactgaaatttatcaacatgaaatgcctggtggacagtattcgaatttaagtcaacaagctaaaagtttaggtttaggcgaaagatttgatgaagtcaaagatatgtatcgcagagtgaatttcttatttggtgatatcgtaaaagtaacaccatcgtctaaagtagttggtgatatggcactttatatggtacaaaatgatcttgatgaacaatccgtgattacagatggctataaattagatttcccagaatcagtagtgtcgttcttcaaaggtgaaataggacaacctgtaaatggttttaataaagatttacaagcggttattttaaaaggccaagaagcactaacagctcgtccaggtgaatatctagagccagttgattttgaaaaagtccgtgagttgcttgaagaagagcaacaaggtcctgttacggagcaagatattattagttatgtactatatccaaaagtatatgaacaatatattcaaactagaaatcaatacggaaacttatcgttacttgatacgcctacattcttctttggaatgcgtaatggtgaaacagtagaaatcgaaatcgataaaggtaaacgattaattattaaactagaaacgattagtgaaccagatgaaaatggtaatagaacgatttactatgcgatgaatggtcaagcgagacgtatttacattaaagatgaaaatgtgcatacaaatgcgaacgttaagccaaaagcagataagagtaatccaagtcatatcggtgctcaaatgccaggttcagtaactgaagtcaaggttagtgtaggtgaaactgtgaaagctaatcagccgttgctaattactgaagctatgaaaatggaaacaacaattcaagcaccatttgacggtgtgattaaacaagtaactgtaaataatggtgacacaatagcgacaggcgatttattaatcgaaattgaaaaagcaactgactaa

SEQ ID NO: 7488 - protein, 1150 aa, Staphylococcus aureus
  misc_feature (458)..(458): Xaa can be any naturally occurring amino acid
MKQIKKLLVANRGEIAIRIFRAAAELDISTVAIYSNEDKSSLHRYKADESYLVGSDLGPAESYLNIERIIDVAKQANVDAIHPGYGFLSENEQFARRCAEEGIKFIGPHLEHLDMFGDKVKARTTAIKADLPVIPGTDGPIKSYELAKEFAEEAGFPLMIKATSGGGGKGMRIVREESELEDAFHRAKSEAEKSFGNSEVYIERYIDNPKHIEVQVIGDEHGNIVHLFERDCSVQRRHQKVVEVAPSVGLSSTLRQRICDAAIQLMENIKYVNAGTVEFLVSGDEFFFIEVNPRVQVEHTITEMVTGIDIVKTQILVAAGADLFGEEINMPQQKDITTLGYAIQCRITTEDPLNDFMPDTGTIIAYRSSGGFGVRLDAGDGFQGAEISPYYDSLLVKLSTHAISFKQAEEKMVRSLREMRIRGVKTNIPFLINVMKNKKFTSGDYTTKFIEETPELFXIQPSLDRGTKTLEYIGNVTINGFPNVEKRPKPDYELASIPTVSSSKIASFSGTKQLLDEVGPKGVAEWVKKQDDVLLTDTTFRDAHQSLLATRVRTKDMINIASKTADVFKDGFSLEMWGGATFDVAYNFLKENPWERLERLRKAIPNVLFQMLLRASNAVGYKNYPDNVIHKFVQESAKAGIDVFRIFDSLNWVDQMKVANEAVQEAGKISEGTICYTGDILNPERSNIYTLEYYVKLAKELEREGFHILAIKDMAGLLKPKAAYELIGELKSAVDLPIHLHTHDTSGNGLLTYKQAIDAGVDIIDTAVASMSGLTSQPSANSLYYALNGFPRHLRTDIEGMESLSHYWSTVRTYYSDFESDIKSPNTEIYQHEMPGGQYSNLSQQAKSLGLGERFDEVKDMYRRVNFLFGDIVKVTPSSKVVGDMALYMVQNDLDEQSVITDGYKLDFPESVVSFFKGEIGQPVNGFNKDLQAVILKGQEALTARPGEYLEPVDFEKVRELLEEEQQGPVTEQDIISYVLYPKVYEQYIQTRNQYGNLSLLDTPTFFFGMRNGETVEIEIDKGKRLIIKLETISEPDENGNRTIYYAMNGQARRIYIKDENVHTNANVKPKADKSNPSHIGAQMPGSVTEVKVSVGETVKANQPLLITEAMKMETTIQAPFDGVIKQVTVNNGDTIATGDLLIEIEKATD

SEQ ID NO: 7489 - DNA, 1848 bp, Staphylococcus aureus
  misc_feature (134)..(134): n is a, c, g or t
atgactaataaaagagaagatgtccgcaatatagcaattattgctcacgttgaccatggtaaaacaactttagtagatgagttgttaaaacaatctggtatattcagagaaaatgaacatgtcgatgaacgtgnaatggactctaacgatatcgaaagagagcgtggaattacgattctagccaaaaatacggctgttgattataaaggtacacgtattaatattttggatacaccaggacatgcagactttggtggagaagtagaacgtattatgaaaatggttgatggggttgtcttagtagtagatgcgtatgaaggtacaatgcctcaaacacgttttgtacttaaaaaagcgctagaacaaaacctgaaacctgttgttgttgttaataaaattgataaaccatcagcacgtccagagggtgttgtagatgaagttttagatttatttattgaattagaagcaaacgatgaacaattagaattccctgttgtttatgcttcagcagtaaatggtacagctagcttagatcctgaaaagcaagatgataatttacaatcattatatgaaacaattattgattatgtaccagctccaattgataacagtgatgagccattacaattccaagtagcattgttggactacaatgattatgttggacgtattggtattggtcgtgtattcagaggtaaaatgcgtgtcggagataatgtatcactaattaaattagacggtacagtgaaaaacttccgtgtaactaaaatctttggttactttggattaaaacgtttagaaattgaagaagcacaagctggagatttaattgctgtttcaggtatggaagacattaatgttggtgaaactgtaacaccacatgaccatcaagaagcattgccagttctacgtattgatgagcctactcttgaaatgacatttaaagttaacaattctccatttgctggccgtgaaggtgactttgtaacagcacgtcaaattcaagaacgtttaaatcaacaattagaaacagatgtatctttgaaagtttctaacacagattctccagatacatgggtagttgctggtcgcggtgaattgcatttatcaatccttattgaaaatatgcgtcgtgaaggttatgaattacaagtttcaaaaccacaagtaattattaaagaaatagatggtgtaatgtgtgaaccatttgaacgtgtgcaatgtgaagtgccacaagaaaatgcaggtgctgttattgaatcattaggtgcacgtaaaggtgaaatggttgatatgactacaactgataatggacttacacgtttaatctttaatgtaccggctcgtggtatgattggttatacgactgaatttatgtcaatgacaagaggttacggtattattaaccatacatttgaagaatttagaccacgtattaaagcacaaattggcggtcgtcgtaatggtgcattaatttcaatggatcaaggttctgcaagtacttatgccattttgggacttgaagatagaggtgtaaacttcatggaacctggtactgaagtttatgaaggtatgattgttggtgaacataatcgtgaaaatgatttaactgttaacatcactaaaacaaaacatcaaactaacgtacgttctgcaacgaaagaccaaacacaaacaatgaatagaccgcgtattctaacattggaagaagcgttacaattcattaatgatgatgaacttgttgaggttacaccagaaagtatacgtttaagaaagaaaattttaaacaaaaatgttcgtgaaaaagaagcaaagcgtatcaaacaaatgatgcaagaaaacgaataa

SEQ ID NO: 7490 - protein, 615 aa, Staphylococcus aureus
  misc_feature (45)..(45): Xaa can be any naturally occurring amino acid
MTNKREDVRNIAIIAHVDHGKTTLVDELLKQSGIFRENEHVDERXMDSNDIERERGITILAKNTAVDYKGTRINILDTPGHADFGGEVERIMKMVDGVVLVVDAYEGTMPQTRFVLKKALEQNLKPVVVVNKIDKPSARPEGVVDEVLDLFIELEANDEQLEFPVVYASAVNGTASLDPEKQDDNLQSLYETIIDYVPAPIDNSDEPLQFQVALLDYNDYVGRIGIGRVFRGKMRVGDNVSLIKLDGTVKNFRVTKIFGYFGLKRLEIEEAQAGDLIAVSGMEDINVGETVTPHDHQEALPVLRIDEPTLEMTFKVNNSPFAGREGDFVTARQIQERLNQQLETDVSLKVSNTDSPDTWVVAGRGELHLSILIENMRREGYELQVSKPQVIIKEIDGVMCEPFERVQCEVPQENAGAVIESLGARKGEMVDMTTTDNGLTRLIFNVPARGMIGYTTEFMSMTRGYGIINHTFEEFRPRIKAQIGGRRNGALISMDQGSASTYAILGLEDRGVNFMEPGTEVYEGMIVGEHNRENDLTVNITKTKHQTNVRSATKDQTQTMNRPRILTLEEALQFINDDELVEVTPESIRLRKKILNKNVREKEAKRIKQMMQENE

SEQ ID NO: 7491 - DNA, 483 bp, Staphylococcus aureus
  misc_feature (277)..(277): n is a, c, g or t
gtgaaagtagcagtcattatgggcagttcttccgattggaaaattatgcaagagagttgtaacatgttggattattttgaaattccgtacgaaaaacaagtagtatccgcacatcgtacgccaaaaatgatggttcaatttgcttctgaagcgagagaaagaggtataaacattatcattgcaggcgctggcggtgcggcacatttaccaggtatggttgcatcattaacgacgctaccagttattggagtgccgattgaaacaaaaagtttaaagngtatagattctttattatcaattgttcaaatgccaggaggtattccggttgcaacgactgcaattggtgcagcaggtgctaaaaacgcaggtatacttgcagcaagaatgttaagtattcaaaatccttctttagttgaaaaactaaatcagtatgaatcttcgttaattcaaaaagtggaggacatgcaaaatgaacttcaataa

SEQ ID NO: 7492 - protein, 160 aa, Staphylococcus aureus
  misc_feature (93)..(93): Xaa can be any naturally occurring amino acid
MKVAVIMGSSSDWKIMQESCNMLDYFEIPYEKQVVSAHRTPKMMVQFASEARERGINIIIAGAGGAAHLPGMVASLTTLPVIGVPIETKSLKXIDSLLSIVQMPGGIPVATTAIGAAGAKNAGILAARMLSIQNPSLVEKLNQYESSLIQKVEDMQNELQ

SEQ ID NO: 7493 - DNA, 3771 bp, Staphylococcus aureus
  misc_feature (2648)..(2648): n is a, c, g or t
atggcgaaaaaattcaattacaaactaccatcaatggttgcattaacgcttgtaggttcagcagtcactgcacatcaagttcaagcagctgagacgacacaagatcaaactactaataaaaacgttttagatagtaataaagttaaagcaactactgaacaagcaaaagctgaggtaaaaaatccaacgcaaaacatttctggcactcaagtatatcaagaccctgctattgtccaaccaaaaacagcaaataacaaaacaggcaatgctcaagtaagtcaaaaagttgatactgcacaagtaaatggtgacactcgtgctaatcaatcagcgactacaaataatacgcagcctgttgcaaagtcaacaagcactacagcacctaaaactaacactaatgttacaaatgctggttatagtttagttgatgatgaagatgataattcagaaaatcaaattaatccagaattaattaaatcagctgctaaacctgcagctcttgaaacgcaatataaaaccgcagcacctaaagctgcaactacatcagcacctaaagctaaaactgaagcgacacctaaagtaactacttttagcgcttcagcacaaccaagatcagttgctgcaacaccaaaaacgagtttgccaaaatataaaccacaagtaaactcttcaattaacgattacattcgtaaaaataacttaaaagcacctaaaattgaagaagattatacatcttacttccctaaatacgcataccgtaacggcgtaggtcgtcctgaaggtatcgtagttcatgatacagctaatgatcgttcgacgataaatggtgaaattagttatatgaaaaataactatcaaaacgcattcgtacatgcatttgttgatggggatcgtataatcgaaacagcaccaacggattacttatcttggggtgtcggtgcagtcggtaaccctagattcattaatgttgaaatcgtacacacacacgactatgcttcatttgcacgttcaatgaataactatgctgactatgcagctacacaattacaatattatggtttaaaaccagacagtgctgagtatgatggaaatggtacagtatggactcactacgctgtaagtaaatatttaggtggtactgaccatgccgatccacatggatatttaagaagtcataattatagttatgatcaattatatgacttaattaatgaaaaatatttaataaaaatgggtaaagtggcgccatggggtacgcaatctacaactacccctactacaccatcaaaaccaacaacaccgtcgaaaccatcaactggtaaattaacagttgctgcaaacaatggtgtcgcacaaatcaaaccaacaaatagtggtttatatactactgtatacgacaaaactggtaaagcaactaatgaagttcaaaaaacatttgctgtatctaaaacagctacattaggtaatcaaaaattctatcttgttcaagattacaattctggtaataaatttggttgggttaaagaaggcgatgtggtttacaacacagctaaatcacctgtaaatgtaaatcaatcatattcaatcaaacctggtacgaaactttatacagtaccttggggtacatctaaacaagttgctggtagtgtgtctggctctggaaaccaaacatttaaggcttcaaagcaacaacaaattgataaatcaatttatttatatggctctgtgaatggtaaatctggttgggtaagtaaagcatatttagttgatactgctaaacctacgcctacaccaacacctaagccatcaacacctacaacaaataataaattaacagtttcatcattaaacggtgttgctcaaattaatgctaaaaacaatggcttattcactacagtttatgacaaaactggtaagccaacgaaagaagttcaaaaaacatttgctgtaacaaaagaagcaagtttaggtggaaacaaattctacttagttaaagattacaatagtccaactttaattggttgggttaaacaaggtgacgttatttataacaatgcaaaatcacctgtaaatgtaatgcaaacatatacagtaaaaccaggcactaaattatattcagtaccttggggcacttataaacaagaagctggtgcagtttctggtacaggtaaccaaacttttaaagcgactaagcaacaacaaattgataaatctatctatttatttggaactgtaaatggtaaatctggttgggtaagtaaagcatatttagctgtacctgctgcacctaaaaaagcagtagcacaaccaaaaacagctgtaaaagcttatactgttactaaaccacaaacgactcaaacagttagcaagattgctcaagttaaaccaaacaacactggtattcgtgcttctgtttatgaaaaaacagcgaaaaacggtgcgaaatatgcagaccgtacgttctatgtaacaaaagagcgtgctcatggtaatgaaacgtatgtattattaaacaatacaagccataacatcccattaggttggttcaatgtaaaagacttaaatgttcaaaacttaggcaaagaagttaaaacgactcaaaaatatactgttaataaatcaaataacggcttatcaatggttccttngggtactaaaaaccaagtcattttaacaggcaataacattgctcaaggtacatttaatgcaacgaaacaagtatctgtaggcaaagatgtttatttatacggtactattaataaccgcactggttgggtaaatgcaaaagatttaactgcaccaactgctgtgaaaccaactacatcagctgccaaagattataactacacttatgtaattaaaaatggtaatggttattactatgtaacaccaaattctgatacagctaaatactcattaaaagcatttaatgaacaaccattcgcagttgttaaagaacaagtcattaatggacaaacttggtactatggtaaattatctaacggtaaattagcatggattaaatcaactgatttagctaaagaattaattaagtataatcaaacaggtatgacattaaaccaagttgctcaaatacaagctggtttacaatataaaccacaagtacaacgtgtaccaggtaagtggacagatgctaactttaatgatgttaagcatgcaatggatacgaagcgtttagctcaagatccagcattaaaatatcaattcttacgcttagaccaaccacaaaatatttctattgataaaattaatcaattcttaaaaggtaaaggtgtattagaaaaccaaggtgctgcatttaacaaagctgctcaaatgtatggcattaatgaagtttatcttatctcacatgccctattagaaacaggtaacggtacttctcaattagcgaaaggtgcagatgtagtgaacaacaaagttgtaactaactcaaacacgaaataccataacgtatttggtattgctgcatatgataacgatcctttacgtgaaggtattaaatatgctaaacaagctggttgggacacagtatcaaaagcaatcgttggtggtgctaaattcatcggcaactcatatgtaaaagctggtcaaaatacactttacaaaatgagatggaatcctgcacatccaggaacacaccaatatgctacagatgtagattgggctaacatcaatgctaaaatcatcaaaggctactatgataaaattggcgaagtcggcaaatacttcgacatcccacaatataaataa

SEQ ID NO: 7494 - protein, 1256 aa, Staphylococcus aureus
  misc_feature (883)..(883): Xaa can be any naturally occurring amino acid
MAKKFNYKLPSMVALTLVGSAVTAHQVQAAETTQDQTTNKNVLDSNKVKATTEQAKAEVKNPTQNISGTQVYQDPAIVQPKTANNKTGNAQVSQKVDTAQVNGDTRANQSATTNNTQPVAKSTSTTAPKTNTNVTNAGYSLVDDEDDNSENQINPELIKSAAKPAALETQYKTAAPKAATTSAPKAKTEATPKVTTFSASAQPRSVAATPKTSLPKYKPQVNSSINDYIRKNNLKAPKIEEDYTSYFPKYAYRNGVGRPEGIVVHDTANDRSTINGEISYMKNNYQNAFVHAFVDGDRIIETAPTDYLSWGVGAVGNPRFINVEIVHTHDYASFARSMNNYADYAATQLQYYGLKPDSAEYDGNGTVWTHYAVSKYLGGTDHADPHGYLRSHNYSYDQLYDLINEKYLIKMGKVAPWGTQSTTTPTTPSKPTTPSKPSTGKLTVAANNGVAQIKPTNSGLYTTVYDKTGKATNEVQKTFAVSKTATLGNQKFYLVQDYNSGNKFGWVKEGDVVYNTAKSPVNVNQSYSIKPGTKLYTVPWGTSKQVAGSVSGSGNQTFKASKQQQIDKSIYLYGSVNGKSGWVSKAYLVDTAKPTPTPTPKPSTPTTNNKLTVSSLNGVAQINAKNNGLFTTVYDKTGKPTKEVQKTFAVTKEASLGGNKFYLVKDYNSPTLIGWVKQGDVIYNNAKSPVNVMQTYTVKPGTKLYSVPWGTYKQEAGAVSGTGNQTFKATKQQQIDKSIYLFGTVNGKSGWVSKAYLAVPAAPKKAVAQPKTAVKAYTVTKPQTTQTVSKIAQVKPNNTGIRASVYEKTAKNGAKYADRTFYVTKERAHGNETYVLLNNTSHNIPLGWFNVKDLNVQNLGKEVKTTQKYTVNKSNNGLSMVPXGTKNQVILTGNNIAQGTFNATKQVSVGKDVYLYGTINNRTGWVNAKDLTAPTAVKPTTSAAKDYNYTYVIKNGNGYYYVTPNSDTAKYSLKAFNEQPFAVVKEQVINGQTWYYGKLSNGKLAWIKSTDLAKELIKYNQTGMTLNQVAQIQAGLQYKPQVQRVPGKWTDANFNDVKHAMDTKRLAQDPALKYQFLRLDQPQNISIDKINQFLKGKGVLENQGAAFNKAAQMYGINEVYLISHALLETGNGTSQLAKGADVVNNKVVTNSNTKYHNVFGIAAYDNDPLREGIKYAKQAGWDTVSKAIVGGAKFIGNSYVKAGQNTLYKMRWNPAHPGTHQYATDVDWANINAKIIKGYYDKIGEVGKYFDIPQYK

SEQ ID NO: 7495 - DNA, 420 bp, Staphylococcus aureus
  misc_feature (89)..(89): n is a, c, g or t
atgtataaacaacttgaaaaacttattacactgactaacaatgacttaaacttagtgaatagaagatttggacaacgcacggatatcanatctgaacagctagaacttctccgtattttatttaattacgatcgcttatcacagtatgatttgacgatgaagattagcagggaacaatctatagtttcaaggtggattaagaaattagttttgaaagggtacatcacaagtcaacaatctagcgaagattttagatgtaaagaattaattttgactgatcaagcacgtacattaatttcacaaataaataatgcacgttgcgaattgattgaagcaagatgtcaatgtttatcggaagtcgaattagacaatttaaatcaattacttgataagttaaatcaacgacgcatatcgttgtaa

SEQ ID NO: 7496 - protein, 139 aa, Staphylococcus aureus
  misc_feature (30)..(30): Xaa can be any naturally occurring amino acid
MYKQLEKLITLTNNDLNLVNRRFGQRTDIXSEQLELLRILFNYDRLSQYDLTMKISREQSIVSRWIKKLVLKGYITSQQSSEDFRCKELILTDQARTLISQINNARCELIEARCQCLSEVELDNLNQLLDKLNQRRISL

SEQ ID NO: 7497 - DNA, 1674 bp, Staphylococcus aureus
  misc_feature (1045)..(1045): n is a, c, g or t
atgggaaatcataaagcagctttaacgaagcaagtttttacatttgcatctgagttatatgcgtacggcgtaagggaagtagttatcagtccgggatcacgctcaacgccacttgcacttgcatttgaagcacatccaaatattaaaacatggatacaccccgatgagcgaagtgcagcgttttttgcagttgggttaattaaaggcagtgaaagacctgtcgctatattatgtacgtcaggtacagcagcagcgaattatacgcctgcaattgctgaaagccaaattagtagaattcctttaatcgttttaacaagtgaccgtccgcatgaattaagaagtgtaggcgcaccacaagcgattaatcaagtaaatatgtttaataattatgtaagttatgagttcgatatgcctattgcggatgatagtaaagagaccattgatgcaatttactatcaaatgcaaattgctagtcaatatttatatggaccacataaagggccaattcattttaacttgccatttagagatccgttaacacctgatttgaatgcaacagaattgttaacttctgagatgaagattttaccgcactatcaaaaaagtatagatgcatcggcattaagacacattttaaataagaaaaaaggtttaattattgtaggggatatgcagcaccaagaagttgatcaaatactaacgtattcaacgatatatgatttgcctattttagctgatcctttaagtcatttaagaaaatttgatcatccgaatgttatctgtacatatgatttgctgtttagaagcggcttagacttaaatgtggatttcgtaattcgtgttgggaaaccagtgatttctaaaaagttaaatcaatggttaaagaaaactgatgcatttcaaatattagtgcaaaacaatgataagattgatgtctttccgatagcgccagatatttcatatgagatttctgcgaatgatttctttaggtcattaatggaagacacgacagttaatcgcgtaagttggttagaaaaatggcaangcttagagaaaaaagggcgtaaagaaattaaatgttatttggaacaagctacagatgagagtgcattcgttggtgaattgattaagaaaacatctgaaaaagatgcattatttattagtaatagtatgcctatcagagatgtagataacttgttattgaataaaaatatagatgtctatgcgaatcgtggtgcgaatggtattgatggtatcgtttcaactgcactgggtatggctgtgcataaacgaataacattattgataggtgatttatcattttatcatgatatgaatggactattaatgtcaaaattaaataatattcagatgaatattgtattattgaacaacgatggtggcggtattttttcatatttaccacaaaaagaaagtgcaactgactattttgaacggttgtttggcacaccgacgggattggatttcgagtatacagctaagttatatcaattcgattttaaacgttttaacagtgtttcagaatttaaaaatgccacattgttatctgaaacttcgacgatttatgaattgataacgaatcgcgaagataactttaaacagcatcaaattttataccagaaattgagtgaaatgattcatgacacattataa

SEQ ID NO: 7498 - protein, 557 aa, Staphylococcus aureus
  misc_feature (349)..(349): Xaa can be any naturally occurring amino acid
MGNHKAALTKQVFTFASELYAYGVREVVISPGSRSTPLALAFEAHPNIKTWIHPDERSAAFFAVGLIKGSERPVAILCTSGTAAANYTPAIAESQISRIPLIVLTSDRPHELRSVGAPQAINQVNMFNNYVSYEFDMPIADDSKETIDAIYYQMQIASQYLYGPHKGPIHFNLPFRDPLTPDLNATELLTSEMKILPHYQKSIDASALRHILNKKKGLIIVGDMQHQEVDQILTYSTIYDLPILADPLSHLRKFDHPNVICTYDLLFRSGLDLNVDFVIRVGKPVISKKLNQWLKKTDAFQILVQNNDKIDVFPIAPDISYEISANDFFRSLMEDTTVNRVSWLEKWQXLEKKGRKEIKCYLEQATDESAFVGELIKKTSEKDALFISNSMPIRDVDNLLLNKNIDVYANRGANGIDGIVSTALGMAVHKRITLLIGDLSFYHDMNGLLMSKLNNIQMNIVLLNNDGGGIFSYLPQKESATDYFERLFGTPTGLDFEYTAKLYQFDFKRFNSVSEFKNATLLSETSTIYELITNREDNFKQHQILYQKLSEMIHDTL

SEQ ID NO: 7499 - DNA, 1191 bp, Staphylococcus aureus
  misc_feature (815)..(815): n is a, c, g or t
atgcaagattcttcgttaaataattacgctaatcataaaaatttcattttaatgcttattatcttatttttaatggaatttgcgagaggcatgtatatcctaagctatattaatttcttgccaacagttacatccattgctgtagcaataacgtctctagcattttcaatacattttattgctgatgcatctacaaactttgttataggatttttactgaaaaaattcggcacaaaaatcgttttaacgactggatttattttagcatttacaagtttatttttagttatttggtttccagcatcaccttttgtaatcatatttagtgctatgatgctcggtattgcagttagtcctatttgggtcattatgttatccagtgttgaagaagataaacgtggcaaacaaatgggctatgtttatttttcatggttgttaggcctattggtaggtatggtttttatgaatctacttatcaaagtgcacccaacacgctttgccttcatgatgtctttagtcgttttaattgcatggatattatattattttgtcgatgtaaagttaacaaattataatactcgtccagttaaagctcaattgagacaaattgttgatgtgacaaagcgccatttattgttgttccctggtattcttttacaaggtgccgcaattgctgccctagttcctatattaccaacatatgctactaaggttattaacgtaagcacaattgaatatactgttgcaatcattattggtggtatcggctgtgcagtttcgatgctatttttatcgaaactaatagataaccgcancagaaactttatgtatggtgttattctaagcggatttattttatacatgatattaatttttactctatctatgattgttaatattcacatcttgtggattatcgctttagctatcggtctaatgtatggcatcttattaccagcatggaatacctttatggcacgatttatcaaatcagatgaacaagaagaaacttggggtgtttttaatagtatccaaggattcggctcaatgatagggccattatttggcggattaattacacaatttaccaacaatttaaacaatacattttatttctcggcattaatctttttagtcttagctgtattttatggaagctactttatagtaaatagagaaaaagctaagtaa

SEQ ID NO: 7500 - protein, 396 aa, Staphylococcus aureus
  misc_feature (272)..(272): Xaa can be any naturally occurring amino acid
MQDSSLNNYANHKNFILMLIILFLMEFARGMYILSYINFLPTVTSIAVAITSLAFSIHFIADASTNFVIGFLLKKFGTKIVLTTGFILAFTSLFLVIWFPASPFVIIFSAMMLGIAVSPIWVIMLSSVEEDKRGKQMGYVYFSWLLGLLVGMVFMNLLIKVHPTRFAFMMSLVVLIAWILYYFVDVKLTNYNTRPVKAQLRQIVDVTKRHLLLFPGILLQGAAIAALVPILPTYATKVINVSTIEYTVAIIIGGIGCAVSMLFLSKLIDNRXRNFMYGVILSGFILYMILIFTLSMIVNIHILWIIALAIGLMYGILLPAWNTFMARFIKSDEQEETWGVFNSIQGFGSMIGPLFGGLITQFTNNLNNTFYFSALIFLVLAVFYGSYFIVNREKAK

SEQ ID NO: 7501 - DNA, 855 bp, Staphylococcus aureus
  misc_feature (305)..(305): n is a, c, g or t
atgaaatttaagtatcatatatcacaacaagaaactgttaaaacttttttagcacgacatgatttttctaagaagacagtgagcgccattaaaaataatggcgctttaattgttaatgatgaaccagtcacagtgcgtaagcaattaatgacaaatgatatattagaaattcatttaccgcgagaaataccgagtgttaatttaataccttatgctcgtaagctagaagtattgtatgaagatgcttttatcatcatagttactaaaccaaacaatcaaaattgtacgccttcgagagaacatcntcatgaaagtttaatcgaacaagtactatatcattgtcaggaacatggtgaaaatattaacccacatattgttacgcgtctagatcataatacaactggtattgtgatattcgctaaatatggacatatccatcatttattttctaaagtaaacttgaaaaaaatatatacttgccttgtatatggtaaaacccatacatctggtattattgaagctaatattagacggtcaaaggataggattataactagagaagttgcctcggatggtaaatacgctaaaacatcttatgaagtaataaatcagaatgataaatacagtttatgcaaagttcatttgcatacgggacgtacacatcaaattcgtgtacattttcaacatattgggcatccaattgtgggagattctttgtatgatggttttcatgacaaaattcatggtcaagtactgcaatgtacgcaaatatattttgttcatccaatcaataagaacaatatttatattacaattgattataagcaattacttaaattattcaatcaactctaa

SEQ ID NO: 7502 - protein, 284 aa, Staphylococcus aureus
  misc_feature (102)..(102): Xaa can be any naturally occurring amino acid
MKFKYHISQQETVKTFLARHDFSKKTVSAIKNNGALIVNDEPVTVRKQLMTNDILEIHLPREIPSVNLIPYARKLEVLYEDAFIIIVTKPNNQNCTPSREHXHESLIEQVLYHCQEHGENINPHIVTRLDHNTTGIVIFAKYGHIHHLFSKVNLKKIYTCLVYGKTHTSGIIEANIRRSKDRIITREVASDGKYAKTSYEVINQNDKYSLCKVHLHTGRTHQIRVHFQHIGHPIVGDSLYDGFHDKIHGQVLQCTQIYFVHPINKNNIYITIDYKQLLKLFNQL

SEQ ID NO: 7503 - DNA, 372 bp, Staphylococcus aureus
  misc_feature (296)..(296): n is a, c, g or t
atgttgaaaaaatggcttggaatggcactaataacgccaatattaacgtttattatatggctttttaatagccatactatcattacatatttaaatatattgttttatgtttcattaattatttttattagcatatttttgattttacttgtacaagaaggcatttttgatgcgacaagttatggttttagaagattaaagtatcaaatgtcatcttcgaaaaagaagaagtctatctctgatgatccatttttcaacccacaagaggtaaaaaaagagcattactttgtttctanatggataatccccttattattaataaatattttatattttattatgacgattgtgctgtcgctcatcttagtataa

SEQ ID NO: 7504 - protein, 123 aa, Staphylococcus aureus
  misc_feature (99)..(99): Xaa can be any naturally occurring amino acid
MLKKWLGMALITPILTFIIWLFNSHTIITYLNILFYVSLIIFISIFLILLVQEGIFDATSYGFRRLKYQMSSSKKKKSISDDPFFNPQEVKKEHYFVSXWIIPLLLINILYFIMTIVLSLILV

SEQ ID NO: 7505 - DNA, 309 bp, Staphylococcus aureus
  misc_feature (27)..(27): n is a, c, g or t
atggaagaggcattgaaagatagtatnttaggtgcattagaaatggtaattgaccctgaattaggaattgatatcgttaatttgggtttagtatacaaagtgaatgttgatgatgaaggcgtatgtacagttgatatgactttaacatcaatgggatgtccaatgggacctcaaattattgatcaagttaaaacagtattagcagagattcctgaaattcaggatactgaagtgaatatcgtatggagtccaccttggacaaaagatatgatgtcacgttacgctaagattgcacttggtgtgagctaa

SEQ ID NO: 7506 - protein, 102 aa, Staphylococcus aureus
  misc_feature (9)..(9): Xaa can be any naturally occurring amino acid
MEEALKDSXLGALEMVIDPELGIDIVNLGLVYKVNVDDEGVCTVDMTLTSMGCPMGPQIIDQVKTVLAEIPEIQDTEVNIVWSPPWTKDMMSRYAKIALGVS

SEQ ID NO: 7507 - DNA, 1317 bp, Staphylococcus aureus
  misc_feature (735)..(735): n is a, c, g or t
atgcccaaaatagtcgtagtcggagcagtcgctggcggtgcaacatgtgccagccaaattcgacgtttagataaagaaagtgacattattatttttgaaaaagatcgtgatatgagctttgctaattgtgcattgccttatgtcattggcgaagttgttgaagatagaagatatgctttagcgtatacacctgaaaaattttatgatagaaagcaaattacagtaaaaacttatcatgaagttattgcaatcaatgatgaaagacaaactgtatctgtattaaatagaaagacaaacgaacaatttgaagaatcttacgataaactcattttaagccctggtgcaagtgcaaatagccttggctttgaaagtgatattacatttacacttagaaatttagaagacactgatgctatcgatcaattcatcaaagcaaatcaagttgataaagtattggttgtaggtgcaggttatgtttcattagaagttcttgaaaatctttatgaacgtggtttacaccctactttaattcatcgatctgataagataaataaattaatggatgccgacatgaatcaacctatacttgatgaattagataagcgggagattccataccgtttaaatgaggaaattaatgctatcaatggaaatgaaattacatttaaatcaggaaaagttgaacattacgatatgattattgaaggtgtcggtactcaccccaattcaaaattnatcgaaagttcaaatatcaaacttgatcgaaaaggtttcataccggtaaacgataaatttgaaacaaatgttccaaacatttatgcaataggcgatattgcaacatcacattatcgacatgtcgatctaccggctagtgttcctttagcttggggcgctcaccgtgcagcaagtattgttgccgaacaaattgctggaaatgacactattgaattcaaaggcttcttaggcaacaatattgtgaagttctttgattatacatttgcgagtgtcggcgttaaaccaaacgaactaaagcaatttgactataaaatggtagaagtcactcaaggtgcacacgcgaattattacccaggaaattcccctttacacttaagagtatattatgacacttcaaaccgtcagattttaagagcagctgcagtaggaaaagaaggtgcagataaacgtattgatgtactatcgatggcaatgatgaaccagctaactgtagatgagttaactgagtttgaagtggcttatgcaccaccatatagccaccctaaagatttaatcaatatgattggttacaaagctaaataa

SEQ ID NO: 7508 - protein, 438 aa, Staphylococcus aureus
  misc_feature (245)..(245): Xaa can be any naturally occurring amino acid
MPKIVVVGAVAGGATCASQIRRLDKESDIIIFEKDRDMSFANCALPYVIGEVVEDRRYALAYTPEKFYDRKQITVKTYHEVIAINDERQTVSVLNRKTNEQFEESYDKLILSPGASANSLGFESDITFTLRNLEDTDAIDQFIKANQVDKVLVVGAGYVSLEVLENLYERGLHPTLIHRSDKINKLMDADMNQPILDELDKREIPYRLNEEINAINGNEITFKSGKVEHYDMIIEGVGTHPNSKXIESSNIKLDRKGFIPVNDKFETNVPNIYAIGDIATSHYRHVDLPASVPLAWGAHRAASIVAEQIAGNDTIEFKGFLGNNIVKFFDYTFASVGVKPNELKQFDYKMVEVTQGAHANYYPGNSPLHLRVYYDTSNRQILRAAAVGKEGADKRIDVLSMAMMNQLTVDELTEFEVAYAPPYSHPKDLINMIGYKAK

SEQ ID NO: 7509 - DNA, 3654 bp, Staphylococcus aureus
  misc_feature (2152)..(2152): n is a, c, g or t
atgacaattccagagaaaccacaaggcgtgatttggactgacgcgcaatggcaaagtatttacgcaactggacaagatgtacttgttgcagccgcggcaggttcaggtaaaacagctgtactagttgagcgtattatccaaaagattttacgtgatggcattgatgtcgatcgacttttagtcgtaacgtttacaaacttaagcgcacgtgaaatgaagcatcgtgtagaccaacgtattcaagaggcatcgattgctgatcctgcaaatgcacacttgaaaaaccaacgcatcaaaattcatcaagcacaaatatctacactccatagtttttgcttgaaattaattcaacagcattatgatgtattaaatattgacccgaactttagaacaagcagtgaagctgaaaatattttattattagaacaaacgatagatgaggtcatagaacaacattacgatatccttgatcctgcttttattgaattaacagagcaattgtcttcagatagaagtgatgatcagtttcgaatgattattaaacaattgtatttctttagcgttgcaaatccaaatcctaaaaattggttggatcaattggtgacaccatacgaagaagaagcacaacaagcgcaacttattcaactactaacagacttatctaaagtatttatcacagctgcttatgatgctttaaataaggcgtatgatttgtttagtatgatggatagcgtcgataaacatttagctgttatagaagatgaacgacgtttaatggggcgtgttttagaaggtggctttattgatataccttatttaactggtcacgaatttggcgcgcgtttgcctaatgtaacagcgaaaattaaagaagcaaatgaaatgatggtcgatgccttagaagatgctaaacttcagtataaaaaatataaatcattaattgataaagtgaagagtgattacttttcaagagaagctgatgatttgaaagctgatatgcaacaattggcgccacgagtaaagtaccttgcgcgtattgtgaaagatgttatgtcagaattcaatcgaaaaaagcgtagcaaaaatattttggatttttctgattatgaacattttgcattacaaattttaactaatgaggatggttcgccttcagaaattgccgaatcataccgtcaacacttccaagaaatattggtcgatgagtatcaagatacgaaccgagttcaagagaaaatactatcttgcatcaaaacgggtgatgaacataatggtaatttatttatggttggagatgttaagcaatccatttataaatttagacaagctgatccaagtttatttattgaaaagtatcaacgctttactatagatggagatggcactggacgtcgaattgatttgtcgcaaaacttccgttctcgaaaagaagtactgtcaacgactaactatatattcaaacatatgatggatgaacaagtcggtgaagtaaaatatgatgaagcggcacagttgtattatggtgcaccatatgatgaatcggaccatccagtaaacttaaaagtccttgttgaagcggatcaagaacatagtgatttaactggtagtgaacaagaagcgcattttatagtagaacaagttaaagatatcttagaacatcaaaaagtttatgatatgaaaacaggaagctatagaagtgcgacatacaaggatatcgttattctagaacgcagctttggacaagctcgcaatttacaacaagcctttaaaaatgaagatattccattccatgtgaatagtcgtgaaggttactttgaacaaacagaagtccgcttagtattatcatttttaagagcgatagataatccattacaagatatttatttagttgggttaatgcgctccgttatatatcagttcaaagaagacgaattagctcaaattagaatattgagtccaaatgatgactacttctatcaatcgattgtaaattacattaatgacgaagcagcagatgcaattttagttgataaattaaaaatgtttttatcagatattcaaagttaccaacaatatagtaaagatcatccggtgtatcagttaattgataaattttataatgatcattatgttattcaatactttagtgganttattggtggacgtggacgacgtgcaaatctttatggtttatttaataaagctatcgagtttgagaattcaagttttagaggtttatatcaatttattcgttttatcgatgaattgattgaaagaggcaaagattttggtgaggaaaatgtagttggtccaaacgataatgtcgttagaatgatgacaattcatagtagtaaaggtctagagtttccatttgtcatttattctggattgtcaaaagattttaataaacgtgatttgaaacaaccagttattttaaatcagcaatttggtctcggaatggattattttgatgtggataaagaaatggcatttccatctttagcttcggttgcatatagagctgttgccgaaaaagaacttgtgtcagaagaaatgcgattagtctatgtagcattaacaagagcgaaagaacaactttatttaattggtagagtgaaaaatgataaatcattactagaactagagcaattgtctatttctggtgagcacattgctgtcaatgaacgattaacttcaccaaatccgttccatcttatttatagtattttatctaaacatcaatctgcgtcaattccagatgatttaaaatttgaaaaagatatagcacaaattgaagatagtagtcgtccgaatgtaaatatttcaattgtgtactttgaagatgtgtctacagaaaccattttagataatgatgaatatcgttcggttaatcaattagaaactatgcaaaatggtaatgaagatgttaaagcacaaattaaacaccaacttgattatcgatatccatatgtaaatgatactaaaaagccctcaaaacaatctgtttctgaattgaaaagacaatatgaaacagaagaaagtggcacaagttacgaacgagtaaggcaatatcgtatcggtttttcaacgtatgaacgacctaaatttctaagtgaacaaggtaaacgaaaagcgaatgaaattggtacgttaatgcatacagtgatgcaacatttaccattcaaaaaagaacgcatatctgaagttgagttacatcagtatatcgatggattaatcgataaacatattatcgaagcagatgcgaaaaaagatatccgtatggatgaaataatgacatttatcaatagtgagttatattcgattattgctgaagcagagcaagtttatcgtgaattaccgtttgtagttaaccaagcattagttgaccaattgccacaaggagacgaagacgtctcaattattcaaggtatgattgacttaatctttgttaaagatggtgtgcattattttgtagactataaaaccgatgcatttaatcgtcgccgtgggatgacagatgaagaaattggtacacaattaaaaaataaatataagatacagatgaaatattatcaaaatacgcttcaaacgattcttaataaagaagttaaaggttatttatacttcttcaaatttggtacattgcaactatag

SEQ ID NO: 7510 - protein, 1217 aa, Staphylococcus aureus
  misc_feature (718)..(718): Xaa can be any naturally occurring amino acid
MTIPEKPQGVIWTDAQWQSIYATGQDVLVAAAAGSGKTAVLVERIIQKILRDGIDVDRLLVVTFTNLSAREMKHRVDQRIQEASIADPANAHLKNQRIKIHQAQISTLHSFCLKLIQQHYDVLNIDPNFRTSSEAENILLLEQTIDEVIEQHYDILDPAFIELTEQLSSDRSDDQFRMIIKQLYFFSVANPNPKNWLDQLVTPYEEEAQQAQLIQLLTDLSKVFITAAYDALNKAYDLFSMMDSVDKHLAVIEDERRLMGRVLEGGFIDIPYLTGHEFGARLPNVTAKIKEANEMMVDALEDAKLQYKKYKSLIDKVKSDYFSREADDLKADMQQLAPRVKYLARIVKDVMSEFNRKKRSKNILDFSDYEHFALQILTNEDGSPSEIAESYRQHFQEILVDEYQDTNRVQEKILSCIKTGDEHNGNLFMVGDVKQSIYKFRQADPSLFIEKYQRFTIDGDGTGRRIDLSQNFRSRKEVLSTTNYIFKHMMDEQVGEVKYDEAAQLYYGAPYDESDHPVNLKVLVEADQEHSDLTGSEQEAHFIVEQVKDILEHQKVYDMKTGSYRSATYKDIVILERSFGQARNLQQAFKNEDIPFHVNSREGYFEQTEVRLVLSFLRAIDNPLQDIYLVGLMRSVIYQFKEDELAQIRILSPNDDYFYQSIVNYINDEAADAILVDKLKMFLSDIQSYQQYSKDHPVYQLIDKFYNDHYVIQYFSGXIGGRGRRANLYGLFNKAIEFENSSFRGLYQFIRFIDELIERGKDFGEENVVGPNDNVVRMMTIHSSKGLEFPFVIYSGLSKDFNKRDLKQPVILNQQFGLGMDYFDVDKEMAFPSLASVAYRAVAEKELVSEEMRLVYVALTRAKEQLYLIGRVKNDKSLLELEQLSISGEHIAVNERLTSPNPFHLIYSILSKHQSASIPDDLKFEKDIAQIEDSSRPNVNISIVYFEDVSTETILDNDEYRSVNQLETMQNGNEDVKAQIKHQLDYRYPYVNDTKKPSKQSVSELKRQYETEESGTSYERVRQYRIGFSTYERPKFLSEQGKRKANEIGTLMHTVMQHLPFKKERISEVELHQYIDGLIDKHIIEADAKKDIRMDEIMTFINSELYSIIAEAEQVYRELPFVVNQALVDQLPQGDEDVSIIQGMIDLIFVKDGVHYFVDYKTDAFNRRRGMTDEEIGTQLKNKYKIQMKYYQNTLQTILNKEVKGYLYFFKFGTLQL

SEQ ID NO: 7511 - DNA, 576 bp, Staphylococcus aureus
  misc_feature (59)..(59): n is a, c, g or t
ttgaaaaaagaaatattggaatggattatttcaattgcagtcgcttttgtcattttatntatagtaggtaaatttattgttacgccatatacaattaaaggtgaatcaatggatccaactttgaaagatggcgagcgagtagctgtaaacattgttggatataaaacaggtggtttggaaaaaggtaatgtagttgtcttccatgcaaacaaaaatgatgactatgttaaacgtgtcatcggtgttcctggtgataaagtagaatacaaaaatgatacattatatgtcaatggtaaaaaacaagatgaaccatatttaaactacaatttaaaacataaacaaggtgattacattactgggactttccaagttaaagatttaccgaatgcgaatcctaaatcaaatgtcattccaaaaggtaaatatttagtgcttggagataatcgtgaagtaagtaaagatagccgtgcgtttggcctcattgatgaagaccaaattgttggtaaagtttcatttaggttctggccatttagtgaatttaaacataatttcaatcctgaaaatactaaaaattaa

SEQ ID NO: 7512 - protein, 191 aa, Staphylococcus aureus
  misc_feature (20)..(20): Xaa can be any naturally occurring amino acid
MKKEILEWIISIAVAFVILXIVGKFIVTPYTIKGESMDPTLKDGERVAVNIVGYKTGGLEKGNVVVFHANKNDDYVKRVIGVPGDKVEYKNDTLYVNGKKQDEPYLNYNLKHKQGDYITGTFQVKDLPNANPKSNVIPKGKYLVLGDNREVSKDSRAFGLIDEDQIVGKVSFRFWPFSEFKHNFNPENTKN

SEQ ID NO: 7513 - DNA, 1128 bp, Staphylococcus aureus
  misc_feature (1052)..(1052): n is a, c, g or t
atgaaaagtaaatacgaaccattgtttgataaagtagaattaccaaatggagtagagttgagaaatcgatttgtgttagcccctttaacacatatttcttcaaatgatgatggtactatttcagatgtagaacttccttatattgaaaagcgttcacaagatgttggtattacaattaatgctgcgagtaatgtgagtgatgtcggaaaagcatttccaggacagccatcaatcgcgcatgacagtaatattgaaggactaaaacgattagctacagcaatgaagaaaaacggtgccaaagcactcgtacaaatacatcatggcggtgcacaagcattgcctgaattaacacctgatggagacgtcgtagcaccaagtccaatttctttaaaaagttttggtcagaaacaagaacatagtgctagagaaatgacgaatgaagagattgaacaagcaatcaaggattttggtgaagcaacgcgacgtgcaattgaagcagggtttgatggtgttgaaatacatggcgcgaatcattacttaattcatcaatttgtatcaccatactataatagaagaaatgatgtatgggcaaatcaatataaattcccggtcgctgtgattgaagaagtacttaaagcgaaagaagcgtatggcaataaagactttatagttggatacagattatctccagaggaagcggagtctccaggaatcacaatggaaattacagaggaactcgttaataaaattagccatatgccaatcgactatattcatgtttcaatgatggatacgcatgcaacgacacgtgaaggtaaatacgctggacaagaaagactgcctttaattcacaaatggataaatggtcgtatgccacttatcggtattggttcaattttcacagctgacgaagctttagatgcagttgaaaatgttggtgttgacttagtagccattggtagagagctactactggattatcaatttgttgaaaaaattaaagatggacgggaagatgaaattattaattactttgatccagagagagaagntaatcatcacttaactcctaatttatggcatcaatttaatgaagggttttatccattaccacgtaaagataaataa

SEQ ID NO: 7514 - protein, 375 aa, Staphylococcus aureus
  misc_feature (351)..(351): Xaa can be any naturally occurring amino acid
MKSKYEPLFDKVELPNGVELRNRFVLAPLTHISSNDDGTISDVELPYIEKRSQDVGITINAASNVSDVGKAFPGQPSIAHDSNIEGLKRLATAMKKNGAKALVQIHHGGAQALPELTPDGDVVAPSPISLKSFGQKQEHSAREMTNEEIEQAIKDFGEATRRAIEAGFDGVEIHGANHYLIHQFVSPYYNRRNDVWANQYKFPVAVIEEVLKAKEAYGNKDFIVGYRLSPEEAESPGITMEITEELVNKISHMPIDYIHVSMMDTHATTREGKYAGQERLPLIHKWINGRMPLIGIGSIFTADEALDAVENVGVDLVAIGRELLLDYQFVEKIKDGREDEIINYFDPEREXNHHLTPNLWHQFNEGFYPLPRKDK

SEQ ID NO: 7515 - DNA, 1284 bp, Staphylococcus aureus
  misc_feature (332)..(332): n is a, c, g or t
atgtcatcaatcgtagtagttgggacacaatggggagacgaaggaaaaggaaaaataacggatttcttggcagaacagtcagatgttatcgcgcgtttttcaggtggtaataatgcaggccataccattcaatttggcggagaaacatataaattacatttagtaccatctggtatcttttacaaagacaaattagcggtaatcggtaacggagtcgttgttgatccagttgcactattgaaagaattagacggattaaatgaacgtggcattcctacaagtaatttacgtatatctaatcgtgcgcaagtgattttaccatatcacttagnacaagatgaatatgaagaacgtttacgtggtgacaataagattggtacaactaaaaaaggtatcggtccagcatatgtagacaaagttcaacgtatcggtattcgtatggcagatttacttgaaaaagaaacattcgaaagattattaaaatcaaacattgaatataaacaagcatatttcaaaggtatgtttaacgaaacatgtccatcatttgatgatatctttgaagaatattatgcagcaggtcaacgtctaaaagaatttgtaacagacacatcaaaaatcttagacgatgcatttgtagcagatgaaaaggtacttttcgaaggtgcgcaaggtgtaatgttagatatcgaccatggtacatatccattcgttacatcaagtaatccaattgcaggtaacgttactgttggtacaggtgtaggtcctacattcgtttcaaaggtaattggtgtatgtaaagcttatacatcacgtgttggtgatggtccattccctactgaattattcgatgaagatggacatcatattagagaggttggtcgtgaatacggtacaacaacaggacgtccacgtcgtgtaggttggtttgattcagttgtattacgtcactctcgtcgtgtaagtggtattacagatttatctattaactcaatcgatgttttaacaggcctagacacagtgaaaatctgtacagcttatgaattagacggtaaagaaattactgagtacccagcaaacttagatcaattaaaacgttgtaaaccaatctttgaagagttaccaggttggacagaagacgtaacaaatgtgcgtactttagaagaattacctgaaaatgcacgtaaatatttagagcgtatttcagaattatgtaatgtacaaatttctatcttctcagttggtccagatagagaacaaacaaacctattaaaagaattgtggtag

SEQ ID NO: 7516 - protein, 427 aa, Staphylococcus aureus
  misc_feature (111)..(111): Xaa can be any naturally occurring amino acid
MSSIVVVGTQWGDEGKGKITDFLAEQSDVIARFSGGNNAGHTIQFGGETYKLHLVPSGIFYKDKLAVIGNGVVVDPVALLKELDGLNERGIPTSNLRISNRAQVILPYHLXQDEYEERLRGDNKIGTTKKGIGPAYVDKVQRIGIRMADLLEKETFERLLKSNIEYKQAYFKGMFNETCPSFDDIFEEYYAAGQRLKEFVTDTSKILDDAFVADEKVLFEGAQGVMLDIDHGTYPFVTSSNPIAGNVTVGTGVGPTFVSKVIGVCKAYTSRVGDGPFPTELFDEDGHHIREVGREYGTTTGRPRRVGWFDSVVLRHSRRVSGITDLSINSIDVLTGLDTVKICTAYELDGKEITEYPANLDQLKRCKPIFEELPGWTEDVTNVRTLEELPENARKYLERISELCNVQISIFSVGPDREQTNLLKELW

SEQ ID NO: 7517 - DNA, 2664 bp, Staphylococcus aureus
  misc_feature (250)..(250): n is a, c, g or t
atggctgaattacctcaatcaagaataaatgaacgaaatattaccagtgaaatgcgtgaatcatttttagattatgcgatgagtgttatcgttgctcgtgcattgccagatgttcgtgacggtttaaaaccagtacatcgtcgtatactatatggattaaatgaacaaggtatgacaccggataaatcatataaaaaatcagcacgtatcgttggtgacgtaatgggtaaatatcaccctcatggtgacntatctatttatgaagcaatggtacgtatggctcaagatttcagttatcgttatccgcttgttgatggccaaggtaactttggttcaatggatggagatggcgcagcagcaatgcgttatactgaagcgcgtatgactaaaatcacacttgaactgttacgtgatattaataaagatacaatagattttatcgataactatgatggtaatgaaagagagccgtcagtcttacctgctcgattccctaacttattagccaatggtgcatcaggtatcgcggtaggtatggcaacgaatattccaccacataacttaacagaattaatcaatggtgtacttagcttaagtaagaaccctgatatttcaattgctgagttaatggaggatattgaaggtcctgatttcccaactgctggacttattttaggtaagagtggtattagacgtgcatatgaaacaggtcgtggttcaattcaaatgcgttctcgtgcagttattgaagaacgtggaggcggacgtcaacgtattgttgtcactgaaattcctttccaagtgaataaggctcgtatgattgaaaaaattgcagagctcgttcgtgacaagaaaattgacggtatcactgatttacgtgatgaaacaagtttacgtactggtgtgcgtgtcgttattgatgtgcgtaaggatgcaaatgctagtgtcattttaaataacttatacaaacaaacacctcttcaaacatcatttggtgtgaatatgattgcacttgtaaatggtagaccgaagcttattaatttaaaagaagcgttggtacattatttagagcatcaaaagacagttgttagaagacgtacgcaatacaacttacgtaaagctaaagatcgtgcccacattttagaaggattacgtatcgcacttgaccatatcgatgaaattatttcaacgattcgtgagtcagatacagataaagttgcaatggaaagcttgcaacaacgcttcaaactttctgaaaaacaagctcaagctattttagacatgcgtttaagacgtctaacaggtttagagagagacaaaattgaagctgaatataatgagttattaaattatattagtgaattagaagcaatcttagctgatgaagaagtgttattacagttagttagagatgaattgactgaaattagagatcgtttcggtgatgatcgtcgtacagaaattcaattaggtggatttgaaaacttagaggacgaagacttaattccagaagaacaaatagtaattacactaagccataataactacattaaacgtttgccggtatctacatatcgtgctcaaaaccgtggtggtcgtggtgttcaaggtatgaatacattggaagaagattttgtcagtcaattggtaactttaagtacacatgaccatgtattgttctttactaacaaaggtcgtgtatacaaacttaaaggttacgaagtgcctgagttatcaagacagtctaaaggtattcctgtagtgaatgctattgaacttgaaaatgatgaagtcattagtacaatgattgctgttaaagaccttgaaagtgaagacaacttcttagtgtttgcaactaaacgtggtgtcgttaaacgttcagcattaagtaacttctcaagaataaatagaaatggtaagattgcgatttcgttcagagaagatgatgagttaattgcagttcgcttaacaagtggtcaagaagatatcttgattggtacatcacatgcatcattaattcgattccctgaatcaacattacgtcctttaggccgtacagcaacgggtgtgaaaggtattacacttcgtgaaggtgacgaagttgtagggcttgatgtagctcatgcaaacagtgttgatgaagtattagtagttactgaaaatggttatggtaaacgtacgccagttaatgactatcgcttatcaaatcgtggtggtaaaggtattaaaacagctacgattactgagcgtaatggtaatgttgtatgtatcactacagtaactggtgaagaagatttaatgattgttactaatgcaggtgtcattattcgactagatgttgcagatatttctcaaaatggtcgtgcagcacaaggtgttcgcttaattcgcttaggtgatgatcaatttgtttcaacggttgctaaagtaaaagaagatgcagaagatgaaacgaatgaagatgagcaatctacttcaactgtatctgaagatggtactgaacaacaacgtgaagcggttgtaaatgatgaaacaccaggaaatgcaattcatactgaagtgattgattcagaagaaaatgatgaagatggacgtattgaagtaagacaagatttcatggatcgtgttgaagaagatatacaacaatcatcagatgaagaataa

SEQ ID NO: 7518 - protein, 887 aa, Staphylococcus aureus
  misc_feature (84)..(84): Xaa can be any naturally occurring amino acid
MAELPQSRINERNITSEMRESFLDYAMSVIVARALPDVRDGLKPVHRRILYGLNEQGMTPDKSYKKSARIVGDVMGKYHPHGDXSIYEAMVRMAQDFSYRYPLVDGQGNFGSMDGDGAAAMRYTEARMTKITLELLRDINKDTIDFIDNYDGNEREPSVLPARFPNLLANGASGIAVGMATNIPPHNLTELINGVLSLSKNPDISIAELMEDIEGPDFPTAGLILGKSGIRRAYETGRGSIQMRSRAVIEERGGGRQRIVVTEIPFQVNKARMIEKIAELVRDKKIDGITDLRDETSLRTGVRVVIDVRKDANASVILNNLYKQTPLQTSFGVNMIALVNGRPKLINLKEALVHYLEHQKTVVRRRTQYNLRKAKDRAHILEGLRIALDHIDEIISTIRESDTDKVAMESLQQRFKLSEKQAQAILDMRLRRLTGLERDKIEAEYNELLNYISELEAILADEEVLLQLVRDELTEIRDRFGDDRRTEIQLGGFENLEDEDLIPEEQIVITLSHNNYIKRLPVSTYRAQNRGGRGVQGMNTLEEDFVSQLVTLSTHDHVLFFTNKGRVYKLKGYEVPELSRQSKGIPVVNAIELENDEVISTMIAVKDLESEDNFLVFATKRGVVKRSALSNFSRINRNGKIAISFREDDELIAVRLTSGQEDILIGTSHASLIRFPESTLRPLGRTATGVKGITLREGDEVVGLDVAHANSVDEVLVVTENGYGKRTPVNDYRLSNRGGKGIKTATITERNGNVVCITTVTGEEDLMIVTNAGVIIRLDVADISQNGRAAQGVRLIRLGDDQFVSTVAKVKEDAEDETNEDEQSTSTVSEDGTEQQREAVVNDETPGNAIHTEVIDSEENDEDGRIEVRQDFMDRVEEDIQQSSDEE

SEQ ID NO: 7519 - DNA, 1017 bp, Staphylococcus aureus
  misc_feature (301)..(301): n is a, c, g or t
ttgactgtttttaaaaatgagcgcttaagctggttaccatacatagctattgtcattttgttacacgttattgggtttagttttttatggattgctggaaaagaccatcatatcttatttggtatggggattcttgcatatacattaggtttgcgtcatgcatttgatgcagatcacattgctgcaatagataatacggttcgcaaattattacagcaacgcaaagatccatctggtgtgggtttctatttttcaattggacattcatctgtcgtatttttaatggctgtttttttagggntatctgtaaaatgggctaaagatgaattaccgcatttccaagatattggtggaacgattggtacactagtttcaggtttctttttagtgcttatcggtgtgttgaatctaattattttaatctctttaattaacttgttcgctaaattacgtcgtgaacacattgaagaagctgaagtcgatgcattacttgaatctagaggattggtttctcgatttgtaggaccttatttcaaattaatcacgcgtagttggcacgtattgccacttggctttttatttggacttggttttgatacagctagtgaaattgcgttactcgctctttcttcaggcgcatcacaacaagccatttcatttatcggaatcttatctttaccaattttattcgcatcaggtatgagtttattggatacattagatggtgttgtaatgaagtatgcctataattgggcattcttcaatcctattcgcaaaatctattacaatataacgattactgcgatatcagtcatggcagcattagtgattgggatgattgaattgctacaaattcttgctgataagttagatttacatggtgcgttttgggcattcattggttcgatcgaatttgattatttaggctatattttagttgcattatttttaattacttggcttatttcaagtttaatttggaagtttggtcgcatagaacacaaatggtctagataa

SEQ ID NO: 7520 - protein, 338 aa, Staphylococcus aureus
  misc_feature (101)..(101): Xaa can be any naturally occurring amino acid
MTVFKNERLSWLPYIAIVILLHVIGFSFLWIAGKDHHILFGMGILAYTLGLRHAFDADHIAAIDNTVRKLLQQRKDPSGVGFYFSIGHSSVVFLMAVFLGXSVKWAKDELPHFQDIGGTIGTLVSGFFLVLIGVLNLIILISLINLFAKLRREHIEEAEVDALLESRGLVSRFVGPYFKLITRSWHVLPLGFLFGLGFDTASEIALLALSSGASQQAISFIGILSLPILFASGMSLLDTLDGVVMKYAYNWAFFNPIRKIYYNITITAISVMAALVIGMIELLQILADKLDLHGAFWAFIGSIEFDYLGYILVALFLITWLISSLIWKFGRIEHKWSR

SEQ ID NO: 7521 - DNA, 873 bp, Staphylococcus aureus
  misc_feature (534)..(534): n is a, c, g or t
gtgaagtatagaaaatttataattttagtgttgagtatcttgatcatattgcctgtaagcacactggatggtcatcatattgcaaatgcagatgacgattcacctaaaaaactgaaatataaagaaaatagtgctctggcattaaattatcaccgtgtaagaaaagcgaattttctgaataattttatttacttcttttctagtagtaaagaaattaaaaattatagtgttagtcaatcacaatttgaatctcaaataaaatggctaaaatcacatgatgctaaatttttaaccttgaaagaatttttatattacaagaaaaaaggtaagtttccaaaacgaagtgtatggattaactttgatgatatggatgaaactatttatgaaaatgcttatccaatcttaaaaaaatataaaataccggcaactgggtttattatcacaggtcatgttggggaagaaaactttcacaacctcgatatgattagtaaaaaagaactaaaagaaatgtataaaactgggttatgggaattngaaacacatacccacgatttgcataacttatctaaaaataataagtcaaaattaatgaaagcttctgaagctacaatcataaaagatttaaacaaaagtgaaaaatatctaactaaaaactttaaaaagtcgcagaaaactatagcctatccttatggcttgatgaatgacgataaattaccggtaatcaaaaaagctgggttaaaatacggtttttcattagaggaaaaagcagtcactccgaactccaatgattattacatccctagaatattaattagtgatgatgcttttgagcatttaattaagagatgggacggattccatgaaaaagattag

SEQ ID NO: 7522 - protein, 290 aa, Staphylococcus aureus
  misc_feature (178)..(178): Xaa can be any naturally occurring amino acid
MKYRKFIILVLSILIILPVSTLDGHHIANADDDSPKKLKYKENSALALNYHRVRKANFLNNFIYFFSSSKEIKNYSVSQSQFESQIKWLKSHDAKFLTLKEFLYYKKKGKFPKRSVWINFDDMDETIYENAYPILKKYKIPATGFIITGHVGEENFHNLDMISKKELKEMYKTGLWEXETHTHDLHNLSKNNKSKLMKASEATIIKDLNKSEKYLTKNFKKSQKTIAYPYGLMNDDKLPVIKKAGLKYGFSLEEKAVTPNSNDYYIPRILISDDAFEHLIKRWDGFHEKD

SEQ ID NO: 7523 - DNA, 561 bp, Staphylococcus aureus
  misc_feature (546)..(546): n is a, c, g or t
atgtctcgaaaaacggcgctattagttttggatatgcaagaaggtatagcgagtagtgtacctagaataaaaaatattattaaagcgaatcagagagcaattgaagcagcaagacaacatcgaataccagtcattttcatacgtttagtgttagataagcattttaatgatgtctcctcgagtaataaagtgttttcaacaattaaagctcaaggatatgcgattactgaagcagatgcatctacacgaatacttgaagatttagcaccactagaagatgagccgattatttctaagcgacgctttagcgcatttacaggtagttacttggaagtttatttacgtgcaaatgatattaatcatttagtattaacgggtgtctctacaagtggagctgtattgagcacggcattagaaagtgtagataaagactattatattactgttttagaagatgctgttggtgatagatcagatgataaacatgactttattattgaacaaattttatcacgctcatgtgacattgaatccgtagagtcatgnaaaagtagtttatag

SEQ ID NO: 7524 - protein, 186 aa, Staphylococcus aureus
  misc_feature (182)..(182): Xaa can be any naturally occurring amino acid
MSRKTALLVLDMQEGIASSVPRIKNIIKANQRAIEAARQHRIPVIFIRLVLDKHFNDVSSSNKVFSTIKAQGYAITEADASTRILEDLAPLEDEPIISKRRFSAFTGSYLEVYLRANDINHLVLTGVSTSGAVLSTALESVDKDYYITVLEDAVGDRSDDKHDFIIEQILSRSCDIESVESXKSSL

SEQ ID NO: 7525 - DNA, 1236 bp, Staphylococcus aureus
  misc_feature (919)..(919): n is a, c, g or t
atgacagatggtccaattaaagtaaatagcgaaattggagctttaaaaactgtgttacttaagcgtcctggaaaagaattagaaaatttagtacctgattatttagatggattactatttgatgatattccatatttagaagtagctcaaaaagagcatgaccattttgcgcaggtgctaagagaagagggtgttgaagtactttaccttgagaagttagcagctgaaagtattgaaaatcctcaagtaagaagtgaatttattgatgatgtattagcagagtctaaaaaaacaatattaggtcatgaagaagaaattaaggcattatttgcgacactttctaatcaagaacttgtagataaaataatgtcaggggtacgtaaggaagaaattaatccgaaatgtacacatctagtagagtatatggatgataagtatccattctatttagatccaatgccaaacctttattttactagagatccacaagcctcaataggacacggtataacaatcaatcggatgttctggagagcacgacgacgagaatcaatatttattcaatatattgtaaagcatcatcctagatttaaagatgcgaatattccaatctggttagatcgagattgcccattcaatattgaaggcggcgatgaacttgttttatctaaagatgtcttggctataggcgtttcagaacgtacatctgcacaagctattgaaaagttagcgcgacgtatttttgaaaatccgcaggcgacgtttaaaaaagtagtagcaattgaaattccaactagtcgaacttttatgcacttagatacagtatttacaatgatagattatgacaaatttacaatgcattcagccattttaaaggcagaaggcaatatgaatatatttattattgaatatgatgacntaaataaagatattgccatcaaacaatctagtcatttaaaagatactttagaagacgtactaggtatagatgatatccaattcattccaacaggaaatggtgatgtcattgatggtgctagagagcaatggaatgatggctcaaatacattatgtataagaccaggcgttgtagtgacttacgatagaaactatgtatcgaatgatttattgagacaaaaaggcattaaagtcattgaaatatctggtagcgagttggtacgtggacgtgggggccctagatgtatgagtcaaccattattcagagaagacatttaa

SEQ ID NO: 7526 - protein, 411 aa, Staphylococcus aureus
  misc_feature (307)..(307): Xaa can be any naturally occurring amino acid
MTDGPIKVNSEIGALKTVLLKRPGKELENLVPDYLDGLLFDDIPYLEVAQKEHDHFAQVLREEGVEVLYLEKLAAESIENPQVRSEFIDDVLAESKKTILGHEEEIKALFATLSNQELVDKIMSGVRKEEINPKCTHLVEYMDDKYPFYLDPMPNLYFTRDPQASIGHGITINRMFWRARRRESIFIQYIVKHHPRFKDANIPIWLDRDCPFNIEGGDELVLSKDVLAIGVSERTSAQAIEKLARRIFENPQATFKKVVAIEIPTSRTFMHLDTVFTMIDYDKFTMHSAILKAEGNMNIFIIEYDDXNKDIAIKQSSHLKDTLEDVLGIDDIQFIPTGNGDVIDGAREQWNDGSNTLCIRPGVVVTYDRNYVSNDLLRQKGIKVIEISGSELVRGRGGPRCMSQPLFREDI

SEQ ID NO: 7527 - DNA, 492 bp, Staphylococcus aureus
  misc_feature (11)..(11): n is a, c, g or t
atgaaatcaanaaaactggctataactgcacttttaattgcaataaatgttgtattaagcagtattatcatcattcctctaggaccagttaaggcagcaccagtacagcattttgtaaatgtattaagtgcggtcatagtaggtccttggtatggattagctcaagcgcttatatcatcaattttaagagttctttttggtactggtacagcttttgcatttccgggtagtatgattggagttttattggctagtatgttttacatatatcgtaaacatatatttatggccgcggtcggtgaagtacttggaactggtgtcatcggaagtttaatttgtataccattagcatatttccttgggcttcaagacttcttcattaaaccgttaatgattacgttcatagtctcaagtgctatcggatctattataagttatttcttattaattactctaaaaaaacgtggtattcttcaaaggtttataaaataa

SEQ ID NO: 7528 - protein, 163 aa, Staphylococcus aureus
  misc_feature (4)..(4): Xaa can be any naturally occurring amino acid
MKSXKLAITALLIAINVVLSSIIIIPLGPVKAAPVQHFVNVLSAVIVGPWYGLAQALISSILRVLFGTGTAFAFPGSMIGVLLASMFYIYRKHIFMAAVGEVLGTGVIGSLICIPLAYFLGLQDFFIKPLMITFIVSSAIGSIISYFLLITLKKRGILQRFIK

SEQ ID NO: 7529 - DNA, 972 bp, Staphylococcus aureus
  misc_feature (245)..(245): n is a, c, g or t
atgaaagtcatagaagtgacacatcctatacaatctaaacagtatattacagaggatgttgcaatggcattcggatttttcgatggcatgcataaaggtcatgacaaagtctttgatatattaaacgaaatagctgaggcacgcagtttaaaaaaagcggtgatgacatttgatccgcatccgtctgtcgtgttgaatcctaaaagaaaacgaacaacgtatttaacgccactttcagataaaancgaaaaaattagccaacatgatattgattattgtatagtggttaatttttcatctaggtttgctaatgtgagcgtagaagattttgttgaaaattatataattaaaaataatgtaaaagaagtcattgctggttttgattttacttttggtaaatttggaaaaggtaatatgactgtacttcaagaatatgatgcgtttaatacgacaattgtgagtaaacaagaaattgaaaatgaaaaaatttctacaacttctattcgtcaagatttaatcaatggtgagttgcaaaaagcgaatgatgctttaggctatatatattctattaaaggcactgtagtgcaaggtgaaaaaaggggaagaactattggcttcccaacagctaacattcaacctagtgatgattatttgttacctcgtaaaggtgtttatgctgttagtattgaaatcggcactgaaaataaattatatcgaggggtagctaacataggtgtaaagccaacatttcatgatcctaacaaagcagaagttgtcatcgaagtgaatatctttgactttgaggataatatttatggtgaacgagtgaccgtgaattggcatcatttcttacgtcctgagattaaatttgatggtatcgacccattagttaaacaaatgaacgatgataaatcgcgtgctaaatatttattagcagttgattttggtgatgaagtagcttataatatctag

SEQ ID NO: 7530 - protein, 323 aa, Staphylococcus aureus
  misc_feature (82)..(82): Xaa can be any naturally occurring amino acid
MKVIEVTHPIQSKQYITEDVAMAFGFFDGMHKGHDKVFDILNEIAEARSLKKAVMTFDPHPSVVLNPKRKRTTYLTPLSDKXEKISQHDIDYCIVVNFSSRFANVSVEDFVENYIIKNNVKEVIAGFDFTFGKFGKGNMTVLQEYDAFNTTIVSKQEIENEKISTTSIRQDLINGELQKANDALGYIYSIKGTVVQGEKRGRTIGFPTANIQPSDDYLLPRKGVYAVSIEIGTENKLYRGVANIGVKPTFHDPNKAEVVIEVNIFDFEDNIYGERVTVNWHHFLRPEIKFDGIDPLVKQMNDDKSRAKYLLAVDFGDEVAYNI

SEQ ID NO: 7531 - DNA, 1308 bp, Staphylococcus aureus
  misc_feature (1258)..(1258): n is a, c, g or t
atgactcaaactgtaaatgtaataggtgctggtcttgccggttcagaagcggcatatcaattagctgaaagaggaattaaagttaatctaatagagatgagacctgttaaacaaacaccagcgcaccatactgataaatttgcggaacttgtatgttccaattcattacgcggaaatgctttaactaatggtgtgggtgttttaaaagaagaaatgagaagattgaattctataattattgaagcggctgataaggcacgagttccagctggtggtgcattagcagttgatagacacgatttttcaggttatattactgaaacacttaaaaatcatgaaaatatcacagttattaatgaagaaattaatgccattccagatggatacacaattatcgcaacaggaccacttactacagaaacccttgcgcaagaaatagtggacattactggtaaagatcaactttatttctatgatgcggctgctccaattattgaaaaagaatctattgatatggataaagtttacttaaagtcccgttatgataaaggtgaagctgcatatttaaactgtcctatgactgaggatgaatttaatcgcttttatgatgcagtattagaagctgaagttgcgcctgtaaattcatttgaaaaagaaaaatatttcgagggttgtatgccttttgaagtaatggcagaacgcggacgcaagacattactatttggaccaatgaaaccagtaggattagaagatccaaagactgggaaacgtccttatgcggtggttcaattaagacaagatgacgctgctggtacactctacaatattgttggcttccaaacgcatttaaaatggggagctcaaaaagaagtcattaaattaattccaggcttagaaaatgttgatattgttagatatggtgtgatgcatagaaataccttcattaattcaccggacgtattaaacgagaaatatgaattgatttcacaaccaaacatacagtttgcgggacaaatgactggtgttgaaggttatgtagaaagcgcagctagcggcttagttgcaggtatcaatcttgcgcataaaatattaggcaagggtgaggtagtatttccgagagaaacaatgattggaagtatggcttactatatttctcatgctaaaaacaataagaatttccaacctatgaatgctaacttcgggttattaccatctttagaaactagaattaaagataaaaaagaacgctatgaagcanaagctaatagagctttggattacttagaaaatttcaaaaaaactttataa

SEQ ID NO: 7532 - protein, 435 aa, Staphylococcus aureus
  misc_feature (420)..(420): Xaa can be any naturally occurring amino acid
MTQTVNVIGAGLAGSEAAYQLAERGIKVNLIEMRPVKQTPAHHTDKFAELVCSNSLRGNALTNGVGVLKEEMRRLNSIIIEAADKARVPAGGALAVDRHDFSGYITETLKNHENITVINEEINAIPDGYTIIATGPLTTETLAQEIVDITGKDQLYFYDAAAPIIEKESIDMDKVYLKSRYDKGEAAYLNCPMTEDEFNRFYDAVLEAEVAPVNSFEKEKYFEGCMPFEVMAERGRKTLLFGPMKPVGLEDPKTGKRPYAVVQLRQDDAAGTLYNIVGFQTHLKWGAQKEVIKLIPGLENVDIVRYGVMHRNTFINSPDVLNEKYELISQPNIQFAGQMTGVEGYVESAASGLVAGINLAHKILGKGEVVFPRETMIGSMAYYISHAKNNKNFQPMNANFGLLPSLETRIKDKKERYEAXANRALDYLENFKKTL

SEQ ID NO: 7533 - DNA, 1167 bp, Staphylococcus aureus
  misc_feature (140)..(140): n is a, c, g or t
atgaatatccacgagtatcaaggtaaagaaatatttcgttcaatgggcgttgcagttccagaaggacgagtagcatttactgctgaagaagcggtggagaaagcaaaagaattaaattctgatgtttatgttgtaaaagnacaaattcatgctggaggtagaggtaaagcaggcggagtaaaaattgctaaatctttatctgaggtagaaacatatgcaaaagaattattagggaaaactttggtgacacatcaaactggtccagaaggtaaagaaattaagcgtttatatatcgaagaaggttgtgctattcaaaaagaatattacgttggattcgttattgatcgtgcgactgaccaagtaacattgatggcgtctgaagaagggggcactgagattgaagaagttgctgcgaagactcctgaaaagatcttcaaagaaactatcgatccagtaatcggactttcaccattccaagcaagacgaattgcgtttaatattaatattcctaaagaatctgttaacaaagctgctaaattcttattagcactttataatgtattcattgaaaaagattgttcaatcgtagaaatcaacccattagttacaacagctgatggtgatgtattggcattagatgctaaaattaattttgatgataatgcattattcagacataaagatgttgtagaattacgtgatttagaagaagaagatccgaaagagattgaagcgtctaaacatgatttatcatacattgcattagatggtgacatcggatgtatggttaatggtgcaggtttagccatggcaacaatggatacgattaatcatttcggtggaaacccagccaatttcttagatgcaggcggaagcgctactagagaaaaagtaactgaagcatttaaaatcattttaggtgatgaaaatgttaaaggtatttttgtaaacattttcggtggcattatgaaatgtgatgttatcgcagaaggtatcgttgaagctgtaaaagaagtagatttaactttaccactagttgtacgcctagaaggtacaaatgttgagttaggtaaaaaaatcttaaaagactcaggattagcaattgaaccagcagcaacaatggctgaaggtgcacaaaaaattgttaaactagtcaaagaagcataa

SEQ ID NO: 7534 - protein, 388 aa, Staphylococcus aureus
  misc_feature (47)..(47): Xaa can be any naturally occurring amino acid
MNIHEYQGKEIFRSMGVAVPEGRVAFTAEEAVEKAKELNSDVYVVKXQIHAGGRGKAGGVKIAKSLSEVETYAKELLGKTLVTHQTGPEGKEIKRLYIEEGCAIQKEYYVGFVIDRATDQVTLMASEEGGTEIEEVAAKTPEKIFKETIDPVIGLSPFQARRIAFNINIPKESVNKAAKFLLALYNVFIEKDCSIVEINPLVTTADGDVLALDAKINFDDNALFRHKDVVELRDLEEEDPKEIEASKHDLSYIALDGDIGCMVNGAGLAMATMDTINHFGGNPANFLDAGGSATREKVTEAFKIILGDENVKGIFVNIFGGIMKCDVIAEGIVEAVKEVDLTLPLVVRLEGTNVELGKKILKDSGLAIEPAATMAEGAQKIVKLVKEA

SEQ ID NO: 7535 - DNA, 2607 bp, Staphylococcus aureus
  misc_feature (2317)..(2317): n is a, c, g or t
gtgttaaaaaagtggctaaattcaaacgtcaaacaattctttgttataactttcattagtgtaatattaacgcttattttattttctactcatatctatgattatattgtgaatggtactgtttttagcggggctggagatggattccgtcaaatgatgccatttcaaatgtatttgtatgaacatctacgtagtttttctagtttatatgatgcatcgtttggattaggtggcgattatatgaaaggactatcatattattattcgctgtcacctttaatgtggctaaattttctattcattaaaataggagaaacggttggtatatttaatccgacgacaatacatttttggccgacaaaccaacttattatggctatgatacgagctatcataacatttgtcgtgaccttctacttatttaaaatattacactttaaacgctcagcaaatatgatcgctacgattttatacggcatgtcaactgtcgttatatactttaattttacttggtcattttatggaaatttattatatttattgccattatcgattcttggtttggaaagatattttcaacaacgcaaaatcggtattttcattgttgcgatagccttaacactatttagcaatttttatttcagttattatcaagctattattataggttgctactatttatatcgactcattttcacttacaaatatgacattgtctctagaacacaaaaattaatttgcgtcatatctgctacagttttgagtgtgttatcaagtgtatttggtttattcactggcatttctgcgtttttggaaaatgacagaaagcaaaatcccaatgttgatataccgtttttgacaccacttgattatcattattttttctttagcgatggattttatattacgatttcaattcttactatcgttgcattattgtcattcaaactgtatcgtttttacttttatagacttttcgcaatagtaacatggatattatttataggttcattatcacagtatttcgacagtgcttttaatggtttttcatttccagaaaggcgttgggtgtatatcttagcactatcatcaagtgctctttgcggattgtttattcaacatttatcaacattaaatatgaaatattatttaatcagaacaatacccgtatgcatcatcgcaatactttatgtattactatcaccgacacacccacttgcacttatagtaggtattatcctgctaatagtgcttgccgttattttaaaatttagtttatggcgttataaaaaattaaccgttgcaatattagtattaatcgttatgattcaacaaatcgtcattttagataacaacaaaaacatggcaatcaaaccttatcaacaatcattatcaacgttgaaacaacatgattaccatagtaactatgtaaaccagcttataaaaaagataaatcaaaatgcaacaggctcatttaatcgcattgattatatgtcagactatgcattaaattcaccatttatatatcattataatggcatttcattatattctagtatttttaatggagacattttaaaatattatgacaagacactccaaattaatatgccaatcgataaaaacagcacttatagattacttggcaatcgtcaaaatttactatcactttggaatgttaatgatcgaattagagtgaatcatgatgacaacttaccatatggatttaaaattaagtctgaacacaaagacaataaagttcgttggattcattctaaaaataccatccattatccaagtgcacatattacaaataaggtcttttccaataaagaattaaaatctccattagataaagaacaagcaatgttgcaagggattgtttctaacaatattaaagatgttaatacacattttaaagccaataaaaatttactatcagattcaacaattaaattaaatagtgcagcctggcaatctcctacaaaacatttattacaagttaaacaaaataatggtggtctaactgtacagttgccaaaatcagtttctaatcaatttaaagatttgtattttgaaatggatttagaattactttcgccggataaagctcatgatgttaaagtgaatgaatatacacaagaaagaaataaactcacttataaatatcgacgcgttgtaacacccgtaacgatacgcattaaagctccagatagaattagattatcattgcctaaaggtaagtatcgagtaaatttaaaagggatatacggcgaagattataccacgcttaaagacgcttcaaattcattagaanctgtcaaagttagtaagacaaagcatggttatactattactaaaaataaaaattcatctgggtatattgttttgccaacagcatataatcaaggtatgaaagcgacatcaggtgatcaaagtcttaaagttgaacaagtaaatggtgttatgaccggcattaaagcacctaaaaatataacaaagattcaattgagctataccccaccatactattatttacttataacaattactatatttggcattatatgtagtattattttcacgagatgggcaagacaaaaataa

SEQ ID NO: 7536 - protein, 868 aa, Staphylococcus aureus
  misc_feature (773)..(773): Xaa can be any naturally occurring amino acid
MLKKWLNSNVKQFFVITFISVILTLILFSTHIYDYIVNGTVFSGAGDGFRQMMPFQMYLYEHLRSFSSLYDASFGLGGDYMKGLSYYYSLSPLMWLNFLFIKIGETVGIFNPTTIHFWPTNQLIMAMIRAIITFVVTFYLFKILHFKRSANMIATILYGMSTVVIYFNFTWSFYGNLLYLLPLSILGLERYFQQRKIGIFIVAIALTLFSNFYFSYYQAIIIGCYYLYRLIFTYKYDIVSRTQKLICVISATVLSVLSSVFGLFTGISAFLENDRKQNPNVDIPFLTPLDYHYFFFSDGFYITISILTIVALLSFKLYRFYFYRLFAIVTWILFIGSLSQYFDSAFNGFSFPERRWVYILALSSSALCGLFIQHLSTLNMKYYLIRTIPVCIIAILYVLLSPTHPLALIVGIILLIVLAVILKFSLWRYKKLTVAILVLIVMIQQIVILDNNKNMAIKPYQQSLSTLKQHDYHSNYVNQLIKKINQNATGSFNRIDYMSDYALNSPFIYHYNGISLYSSIFNGDILKYYDKTLQINMPIDKNSTYRLLGNRQNLLSLWNVNDRIRVNHDDNLPYGFKIKSEHKDNKVRWIHSKNTIHYPSAHITNKVFSNKELKSPLDKEQAMLQGIVSNNIKDVNTHFKANKNLLSDSTIKLNSAAWQSPTKHLLQVKQNNGGLTVQLPKSVSNQFKDLYFEMDLELLSPDKAHDVKVNEYTQERNKLTYKYRRVVTPVTIRIKAPDRIRLSLPKGKYRVNLKGIYGEDYTTLKDASNSLEXVKVSKTKHGYTITKNKNSSGYIVLPTAYNQGMKATSGDQSLKVEQVNGVMTGIKAPKNITKIQLSYTPPYYYLLITITIFGIICSIIFTRWARQK

SEQ ID NO: 7537 - DNA, 2607 bp, Staphylococcus aureus
  misc_feature (283)..(283): n is a, c, g or t
gtgttaaaaaagtggctaaattcaaacgtcaaacaattctttgttataactttcattagtgtaatattaacgcttattttattttctactcatatctatgattatattgtgaatggtactgtttttagcggggctggagatggattccgtcaaatgatgccatttcaaatgtatttgtatgaacatctacgtagtttttctagtttatatgatgcatcgtttggattaggtggcgattatatgaaaggactatcatattattattcgctgtcacctttaatgnggctaaattttctattcattaaaataggagaaacggttggtatatttaatccgacgacaatacatttttggccgacaaaccaacttattatggctatgatacgagctatcataacatttgtcgtgaccttctacttatttaaaatattacactttaaacgctcagcaaatatgatcgctacgattttatacggcatgtcaactgtcgttatatactttaattttacttggtcattttatggaaatttattatatttattgccattatcgattcttggtttggaaagatattttcaacaacgcaaaatcggtattttcattgttgcgatagccttaacactatttagcaatttttatttcagttattatcaagctattattataggttgctactatttatatcgactcattttcacttacaaatatgacattgtctctagaacacaaaaattaatttgcgtcatatctgctacagttttgagtgtgttatcaagtgtatttggtttattcactggcatttctgcgtttttggaaaatgacagaaagcaaaatcccaatgttgatataccgtttttgacaccacttgattatcattattttttctttagcgatggattttatattacgatttcaattcttactatcgttgcattattgtcattcaaactgtatcgtttttacttttatagacttttcgcaatagtaacatggatattatttataggttcattatcacagtatttcgacagtgcttttaatggtttttcatttccagaaaggcgttgggtgtatatcttagcactatcatcaagtgctctttgcggattgtttattcaacatttatcaacattaaatatgaaatattatttaatcagaacaatacccgtatgcatcatcgcaatactttatgtattactatcaccgacacacccacttgcacttatagtaggtattatcctgctaatagtgcttgccgttattttaaaatttagtttatggcgttataaaaaattaaccgttgcaatattagtattaatcgttatgattcaacaaatcgtcattttagataacaacaaaaacatggcaatcaaaccttatcaacaatcattatcaacgttgaaacaacatgattaccatagtaactatgtaaaccagcttataaaaaagataaatcaaaatgcaacaggctcatttaatcgcattgattatatgtcagactatgcattaaattcaccatttatatatcattataatggcatttcattatattctagtatttttaatggagacattttaaaatattatgacaagacactccaaattaatatgccaatcgataaaaacagcacttatagattacttggcaatcgtcaaaatttactatcactttggaatgttaatgatcgaattagagtgaatcatgatgacaacttaccatatggatttaaaattaagtctgaacacaaagacaataaagttcgttggattcattctaaaaataccatccattatccaagtgcacatattacaaataaggtcttttccaataaagaattaaaatctccattagataaagaacaagcaatgttgcaagggattgtttctaacaatattaaagatgttaatacacattttaaagccaataaaaatttactatcagattcaacaattaaattaaatagtgcagcctggcaatctcctacaaaacatttattacaagttaaacaaaataatggtggtctaactgtacagttgccaaaatcagtttctaatcaatttaaagatttgtattttgaaatggatttagaattactttcgccggataaagctcatgatgttaaagtgaatgaatatacacaagaaagaaataaactcacttataaatatcgacgcgttgtaacacccgtaacgatacgcattaaagctccagatagaattagattatcattgcctaaaggtaagtatcgagtaaatttaaaagggatatacggcgaagattataccacgcttaaagacgcttcaaattcattagaagctgtcaaagttagtaagacaaagcatggttatactattactaaaaataaaaattcatctgggtatattgttttgccaacagcatataatcaaggtatgaaagcgacatcaggtgatcaaagtcttaaagttgaacaagtaaatggtgttatgaccggcattaaagcacctaaaaatataacaaagattcaattgagctataccccaccatactattatttacttataacaattactatatttggcattatatgtagtattattttcacgagatgggcaagacaaaaataa

SEQ ID NO: 7538 - protein, 868 aa, Staphylococcus aureus
  misc_feature (95)..(95): Xaa can be any naturally occurring amino acid
MLKKWLNSNVKQFFVITFISVILTLILFSTHIYDYIVNGTVFSGAGDGFRQMMPFQMYLYEHLRSFSSLYDASFGLGGDYMKGLSYYYSLSPLMXLNFLFIKIGETVGIFNPTTIHFWPTNQLIMAMIRAIITFVVTFYLFKILHFKRSANMIATILYGMSTVVIYFNFTWSFYGNLLYLLPLSILGLERYFQQRKIGIFIVAIALTLFSNFYFSYYQAIIIGCYYLYRLIFTYKYDIVSRTQKLICVISATVLSVLSSVFGLFTGISAFLENDRKQNPNVDIPFLTPLDYHYFFFSDGFYITISILTIVALLSFKLYRFYFYRLFAIVTWILFIGSLSQYFDSAFNGFSFPERRWVYILALSSSALCGLFIQHLSTLNMKYYLIRTIPVCIIAILYVLLSPTHPLALIVGIILLIVLAVILKFSLWRYKKLTVAILVLIVMIQQIVILDNNKNMAIKPYQQSLSTLKQHDYHSNYVNQLIKKINQNATGSFNRIDYMSDYALNSPFIYHYNGISLYSSIFNGDILKYYDKTLQINMPIDKNSTYRLLGNRQNLLSLWNVNDRIRVNHDDNLPYGFKIKSEHKDNKVRWIHSKNTIHYPSAHITNKVFSNKELKSPLDKEQAMLQGIVSNNIKDVNTHFKANKNLLSDSTIKLNSAAWQSPTKHLLQVKQNNGGLTVQLPKSVSNQFKDLYFEMDLELLSPDKAHDVKVNEYTQERNKLTYKYRRVVTPVTIRIKAPDRIRLSLPKGKYRVNLKGIYGEDYTTLKDASNSLEAVKVSKTKHGYTITKNKNSSGYIVLPTAYNQGMKATSGDQSLKVEQVNGVMTGIKAPKNITKIQLSYTPPYYYLLITITIFGIICSIIFTRWARQK

SEQ ID NO: 7539 - DNA, 1995 bp, Staphylococcus aureus
  misc_feature (1408)..(1408): n is a, c, g or t
atgataggtaaaataataaatgaacgatataaaattgtagataagcttggcggcggtggcatgagtaccgtttatcttgctgaagatacgatacttaacattaaagttgcaattaaggcgatttttataccacctagagaaaaagaagaaacattaaaacgttttgaacgagaagtacataactcatcacagctatcacatcaaaatatagtaagtatgatcgatgttgatgaagaagatgactgttactacttagtaatggaatatatcgaaggtccgactttgtctgagtatattgaaagtcatgggccattaagtgttgacacagcgattaattttacgaatcaaatattggatggcattaaacatgcgcatgatatgcgtattgtacatagagatattaagccacaaaatatattaattgacagcaataaaacgttgaaaatatttgattttggaattgctaaagctttaagtgagacgtctttaactcagactaatcatgtgttaggtactgtgcagtacttttcgccagaacaagcaaaaggtgaggcaacggatgaatgtacagatatttattctataggtattgtgttatatgaaatgcttgttggtgaaccaccctttaatggagaaactgcagttagcattgcgattaaacatattcaggattctgtgccaaatgtgacaacagatgtacgtaaggatattccgcaatctttaagtaatgtcattttacgcgctacagaaaaagacaaagcgaatcgttacaaaacaattcaagaaatgaaagatgatttgagtagtgttttacatgaaaatcgagcgaatgaagatgtctatgaactcgataaaatgaaaacgatagcggtacctttgaaaaaagaagatctagcaaagcatattagtgaacataagtcgaatcaacctaaacgtgaaacgacgcaagtacctattgtaaatgggcctgctcatcatcagcaattccaaaagccagaaggtacggtgtacgaaccaaaacctaaaaagaaatcaacacgaaagattgtgctcttatcactaatcttttcgttgttaatgattgcacttgtttcttttgtggcaatggcaatgtttggtaataaatacgaagagacacctgatgtaatcgggaaatctgtaaaagaagcagagcaaatattcaataaaaacaacctgaaattgggtaaaatttctagaagttatagtgataaatatcctgaaaatgaaattattaagacaactcctaatactggtgaacgtgttgaacgtggtgacagtgttgatgttgttatatcaaagggccctgaaaaggttaaaatgccaaatgtcattggtttacctaaggaggaagccttgcagaaattaaaatcgttaggtcttaaagatnttacgattgaaaaagtatataataatcaagcgccaaaaggatacattgcaaatcaaagtgtaaccgcaaatactgaaatcgctattcatgattctaatattaaactatatgaatctttaggcattaagcaagtttatgtagaagactttgaacataaatcctttagcaaagctaaaaaagccttagaagaaaaagggtttaaagttgaaagtaaggaagagtatagtgacgatattgatgagggtgatgtgatttctcaatctcctaaaggaaaatcagtagatgaggggtcaacgatttcatttgttgtttctaaaggtaaaaaaagtgactcatcagatgtcaaaacgacaactgaatcggtagatgtaccatacactggtaaaaatgataagtcacaaaaagttaaagtttatattaaagataaagataatgacggttcaactgaaaaaggtagtttcgatattactagtgatcaacgtatagacattcctttaagaattgaaaaaggaaaaacagcaagttatattgttaaagttgacggtaaaactgtagctgaaaaagaagtcagctatgatgatgtataa

SEQ ID NO: 7540 - protein, 664 aa, Staphylococcus aureus
  misc_feature (470)..(470): Xaa can be any naturally occurring amino acid
MIGKIINERYKIVDKLGGGGMSTVYLAEDTILNIKVAIKAIFIPPREKEETLKRFEREVHNSSQLSHQNIVSMIDVDEEDDCYYLVMEYIEGPTLSEYIESHGPLSVDTAINFTNQILDGIKHAHDMRIVHRDIKPQNILIDSNKTLKIFDFGIAKALSETSLTQTNHVLGTVQYFSPEQAKGEATDECTDIYSIGIVLYEMLVGEPPFNGETAVSIAIKHIQDSVPNVTTDVRKDIPQSLSNVILRATEKDKANRYKTIQEMKDDLSSVLHENRANEDVYELDKMKTIAVPLKKEDLAKHISEHKSNQPKRETTQVPIVNGPAHHQQFQKPEGTVYEPKPKKKSTRKIVLLSLIFSLLMIALVSFVAMAMFGNKYEETPDVIGKSVKEAEQIFNKNNLKLGKISRSYSDKYPENEIIKTTPNTGERVERGDSVDVVISKGPEKVKMPNVIGLPKEEALQKLKSLGLKDXTIEKVYNNQAPKGYIANQSVTANTEIAIHDSNIKLYESLGIKQVYVEDFEHKSFSKAKKALEEKGFKVESKEEYSDDIDEGDVISQSPKGKSVDEGSTISFVVSKGKKSDSSDVKTTTESVDVPYTGKNDKSQKVKVYIKDKDNDGSTEKGSFDITSDQRIDIPLRIEKGKTASYIVKVDGKTVAEKEVSYDDV

SEQ ID NO: 7541 - DNA, 1002 bp, Staphylococcus aureus
  misc_feature (358)..(358): n is a, c, g or t
atgaaaaatttacgaaacagaagttttttaactttattagacttttcacgacaagaggtagaattcttattaacactctccgaggatttaaaacgtgctaaatatattggcactgaaaagcctatgttaaaaaataaaaatattgcactgttatttgaaaaagattctacaagaacgcgatgtgcatttgaagttgcagcgcatgatcaaggtgcaaatgtaacttatttaggcccaactggatcacaaatgggtaaaaaagaaacaactaaagatactgcacgtgtgcttggtggaatgtatgatggcattgaataccgtggtttttcacaaagaacagtagaaactttagctgagnattcaggcgtaccagtgtggaatggtttaactgatgaagatcatcctactcaagttcttgctgatttcttaacagcaaaagaagtcttaaaaaaagattatgcagatattaactttacatatgttggagatggtcgtaataacgttgcaaatgcattaatgcaaggtgctgccattatgggtatgaacttccatttagtttgtccaaaagaattaaatccaacagatgaattattaaatcgctgtaaaaatattgccgctgaaaatggtggcaacatattaatcacagatgatattgaccaaggtgtaaaaggttcggatgtaatttacactgatgtttgggtatcaatgggtgaacctgatgaagtatggaaagaacgacttgaattattgaaaccatatcaagtaaataaagaaataatggataaaactggtaatccaaatgttatttttgagcattgcttaccatctttccataatgctgatacgaaaataggtcaacaaatttttgaaaaatatggtattcgagaaatggaagttacagatgaagtattcgaaagtaaagcttcagttgtattccaagaagctgagaacagaatgcatacaatcaaagcagtcatggttgctacattgggtgaattttaa

SEQ ID NO: 7542 - protein, 333 aa, Staphylococcus aureus
  misc_feature (120)..(120): Xaa can be any naturally occurring amino acid
MKNLRNRSFLTLLDFSRQEVEFLLTLSEDLKRAKYIGTEKPMLKNKNIALLFEKDSTRTRCAFEVAAHDQGANVTYLGPTGSQMGKKETTKDTARVLGGMYDGIEYRGFSQRTVETLAEXSGVPVWNGLTDEDHPTQVLADFLTAKEVLKKDYADINFTYVGDGRNNVANALMQGAAIMGMNFHLVCPKELNPTDELLNRCKNIAAENGGNILITDDIDQGVKGSDVIYTDVWVSMGEPDEVWKERLELLKPYQVNKEIMDKTGNPNVIFEHCLPSFHNADTKIGQQIFEKYGIREMEVTDEVFESKASVVFQEAENRMHTIKAVMVATLGEF

SEQ ID NO: 7543 - DNA, 324 bp, Staphylococcus aureus
  misc_feature (69)..(69): n is a, c, g or t
atgaaatttatggcagaaaataggctgacgttaacaaaaggaacagcaaaagatattatagaacgattntacacgagacatgggattgaaacattagaaggctttgatggcatgtttgttacacaaactttagaacaagaagattttgatgaagtgaaaattttaacagtttggaaatcaaagcaagcttttacggattggttaaaatctgatgtctttaaagcagcgcataaacatgttagaagtaaaaatgaagatgaaagtagcccgattataaataacaaagtaattacatatgatataggctatagttacatgaaataa

SEQ ID NO: 7544 - protein, 107 aa, Staphylococcus aureus
  misc_feature (23)..(23): Xaa can be any naturally occurring amino acid
MKFMAENRLTLTKGTAKDIIERXYTRHGIETLEGFDGMFVTQTLEQEDFDEVKILTVWKSKQAFTDWLKSDVFKAAHKHVRSKNEDESSPIINNKVITYDIGYSYMK

SEQ ID NO: 7545 - DNA, 669 bp, Staphylococcus aureus
  misc_feature (386)..(386): n is a, c, g or t
atgatagatcaacaaacaatttatcaatacatacaaaatggaaaaatagaagaagcgttacaagcattgttcggaaatatcgaagaaaatcctacaattattgaaaattatattaatgctggtatcgtacttgctgatgcgaatgagattgaaaaggcagagcgttttttccaaaaagctttaacaatagatccgaagaatggcgtcgtattttttaatctagcaaatgtatattataatcagcaacgttatcaagaagctattaaattatatcaacaagcattacaaacagagattgaacaagttgattgtaattatatgatcggtatggcgtttaatcagttagaatcatttaagctggcattgccgtatttaatgactgctgnggaactagataaagacaaagatgcagaagttcaatttcaatatggtcttgtattatgtcaattagaaatgtttaatgaagccataactcaacttaaacatgtattaacgattgataaaaatcatgttgatgcaagatacaatttgggcttagcgttatttatgaaaaatgaagatattgatgaagcaataactcattttaaagaagctgtgactatcgaccctaaacacttattaagtcagcatgcgctgaaaacattcactaaaatgaaagaggaggagtaa

SEQ ID NO: 7546 - protein, 222 aa, Staphylococcus aureus
  misc_feature (129)..(129): Xaa can be any naturally occurring amino acid
MIDQQTIYQYIQNGKIEEALQALFGNIEENPTIIENYINAGIVLADANEIEKAERFFQKALTIDPKNGVVFFNLANVYYNQQRYQEAIKLYQQALQTEIEQVDCNYMIGMAFNQLESFKLALPYLMTAXELDKDKDAEVQFQYGLVLCQLEMFNEAITQLKHVLTIDKNHVDARYNLGLALFMKNEDIDEAITHFKEAVTIDPKHLLSQHALKTFTKMKEEE

SEQ ID NO: 7547 - DNA, 528 bp, Staphylococcus aureus
  misc_feature (338)..(338): n is a, c, g or t
atgggtttagttcgcaagttttttatgccgaattcatatgttcaatcaatatttcaaattgatttagacaagttagtggacaaaggcgttaaaggtattattacagatttagataatacgctagtaggttgggatgttaaagaacctacagaacgtgttaaagcatggtttaaggaagctaatgaaaaaggaatcactattacaatcgtgtctaataataatgagtctcgtgttgctagttttagtcagcatttagacatcgattttatttttaaagcgagaaagccaatggggaaagcgtttgataaagcaataactaagatgaatatcagaccagntcaaactgttgttataggtgaccaaatgcttactgatgtatttggtggtaatcgtcgaggtctatatacaattatggttgttccagttaaacgaactgatggctttattactaagtttaatagattaattgaaagacgattattacgtcatttcagtaaaaaaggttatatcacatgggaggaaaattga

SEQ ID NO: 7548 - protein, 175 aa, Staphylococcus aureus
  misc_feature (113)..(113): Xaa can be any naturally occurring amino acid
MGLVRKFFMPNSYVQSIFQIDLDKLVDKGVKGIITDLDNTLVGWDVKEPTERVKAWFKEANEKGITITIVSNNNESRVASFSQHLDIDFIFKARKPMGKAFDKAITKMNIRPXQTVVIGDQMLTDVFGGNRRGLYTIMVVPVKRTDGFITKFNRLIERRLLRHFSKKGYITWEEN

SEQ ID NO: 7549 - DNA, 1716 bp, Staphylococcus aureus
  misc_feature (1659)..(1659): n is a, c, g or t
atgagctttaaaatgacgcaaaatcaatatacgagcttatacggtccaactgttggagattccattcgtttaggtgatacgaatctatttgctcaaatagaaaaagactatgcggtttatggtgaagaagctacttttggtggtggtaaatctattagagacggtatggcgcaaaatcctcgtgtaacacgtgatgacgtgaacgttgcagaccttgtcatttctaatgccgttattatcgattacgataaagtggttaaagctgatataggcattaaaaatggttatattttcgccataggtaatgccggcaacccagatataatggataatgtcgacattattataggttcaacaacagatatcattgccgctgaaggtaaaatcgtcactgctggtggtattgatactcatgttcattttattaatcctgaacaagcagaggtcgcattagaaagtggtattacgactcatattggtggtggtactggtgcttcagaaggttctaaagcaacaactgtaactccaggtccatggcatattcatagaatgttagaagctgccgaaggtttaccgattaatgtcggttttacaggtaaaggacaagcaacaaatccaactgcactcattgaacaaatcaatgccggagcaattggattaaaagtacatgaagactggggtgcaacaccatctgctttgagtcatgcattagatgttgctgatgaatttgatgttcaaattgcattacatgcagatactttaaatgaagcaggatttatggaagacacaatggctgctgttaaagaccgtgtacttcatatgtaccatactgaaggtgctggtggcggtcatgcgcctgatttaattaaatccgctgcattttcaaatattttaccttcatctacaaatccaactttgccttatacacataatactgtagatgaacatttagatatggtaatgattactcaccatttaaatgcggctattcctgaagatatcgcattcgcagattcacgtattcgtaaagaaacgattgcagcagaagatgttctgcaagatatgggtgtattcagtatgattagttccgattcacaagcaatgggccgtgtaggtgaagtaattacacgaacatggcaagtagcacatcgcatgaaagaacaacgtggtcctttagatggtgattttgaacataatgataataatcgcatcaaacgttatatcgctaaatatacaattaacccagcaattacacatggtatttctgaatatgtaggatctatcgagccgggcaaactagctgacattgtcttatgggacccaattttctttggggttaaacctgaattagttgtaaagggcggattaattaactctgccgtaaatggcgatgcaaatggttctatacctacatctgaaccgatgaagtaccgtaaaatgtatggtcaatacggcggaaaccttacaagtacgtcaatgacattcgtgtctaaaactgcttatgaaaatggtatcaatcgtgcattaaatttaaaacgcatggtgcgtccagttaaaaatattagacaattatctaaagcagatatgaaaaataacagtgcaacacctaaattagacgttgatccacaaacatatgaagtatatgtagatggagaaaanattacaagtaatgcagcaactgagttaccattaactcaaagatacttcttattctag

SEQ ID NO: 7550 - protein, 571 aa, Staphylococcus aureus
  misc_feature (553)..(553): Xaa can be any naturally occurring amino acid
MSFKMTQNQYTSLYGPTVGDSIRLGDTNLFAQIEKDYAVYGEEATFGGGKSIRDGMAQNPRVTRDDVNVADLVISNAVIIDYDKVVKADIGIKNGYIFAIGNAGNPDIMDNVDIIIGSTTDIIAAEGKIVTAGGIDTHVHFINPEQAEVALESGITTHIGGGTGASEGSKATTVTPGPWHIHRMLEAAEGLPINVGFTGKGQATNPTALIEQINAGAIGLKVHEDWGATPSALSHALDVADEFDVQIALHADTLNEAGFMEDTMAAVKDRVLHMYHTEGAGGGHAPDLIKSAAFSNILPSSTNPTLPYTHNTVDEHLDMVMITHHLNAAIPEDIAFADSRIRKETIAAEDVLQDMGVFSMISSDSQAMGRVGEVITRTWQVAHRMKEQRGPLDGDFEHNDNNRIKRYIAKYTINPAITHGISEYVGSIEPGKLADIVLWDPIFFGVKPELVVKGGLINSAVNGDANGSIPTSEPMKYRKMYGQYGGNLTSTSMTFVSKTAYENGINRALNLKRMVRPVKNIRQLSKADMKNNSATPKLDVDPQTYEVYVDGEXITSNAATELPLTQRYFLF

SEQ ID NO: 7551 - DNA, 453 bp, Staphylococcus aureus
  misc_feature (61)..(61): n is a, c, g or t
atgattgttgaagaaatccaaggcaatattgccaatttgtcaaattcagaaaaacaaaagnacgtcgaaaaagtataccttgaaaattcagatcttgttaaacgtattcaaagagtcgttacagaccatggcactgaaataggcattcgtttaaaacaacctattgacttacaatatggagatattttatacgcagatgaccataatatgattattgtggatgttaattcagaagatcttttagtgattcaaccaagaacattgcaagaaatgggagatatagcccatcaattaggaaatcgtcatttgccagcacaatttacagagactgaaatgctagtacaatatgattatttagttgaagatttattaaaaagtttaggcatcccatatgttcgagaagaccgtaaagttaataaggctttcagacatatagggcattctcatgattga

SEQ ID NO: 7552 - protein, 150 aa, Staphylococcus aureus
  misc_feature (21)..(21): Xaa can be any naturally occurring amino acid
MIVEEIQGNIANLSNSEKQKXVEKVYLENSDLVKRIQRVVTDHGTEIGIRLKQPIDLQYGDILYADDHNMIIVDVNSEDLLVIQPRTLQEMGDIAHQLGNRHLPAQFTETEMLVQYDYLVEDLLKSLGIPYVREDRKVNKAFRHIGHSHD

SEQ ID NO: 7553 - DNA, 26475 bp, Staphylococcus aureus
  misc_feature (7774)..(7774): n is a, c, g or t
gtgaattatcgtgataaaattcaaaagtttagtattcgtaaatatacagttggtacattttcaactgtcattgcgacattggtatttttaggattcaatacatcacaagcacatgctgctgaaacaaatcaaccagcaagcgtggttaaacagaaacaacaaagtaataatgaacagactgagaatcgagaatctcaagtacaaaattctcaaaattcacaaaatggtcaatcattatctgctactcatgaaaatgagcaaccaaatattagtcaagctaatttagtagatcaaaaagtagcgcaatcatctactactaatgatgaacaaccagcatctcaaaatgtaaatacaaagaaagattcggcaacggctgcgacaacacaaccagataaagaacaaagtaagcataaacaaaacgaaagtcaatctgctaataaaaatggaaacgacaatagagcggctcatgtagaaaatcatgaagcaaatgtagtaacagcttcagattcatctgataatggtaacgtacaacatgaccgaaatgaattacaagcgttttttgatgcaaattatcatgattatcgctttattgaccgtgaaaatgcagattctggcacatttaactatgtaaaaggcatttttgataagattaatacgttattaggcagtaatgatccaataaacaataaagacttgcaacttgcatacaaagaattggaacaagctgttgctttaattcgtacaatgcctcaacgtcaacagactagccgacgttcaaatagaattcaaacgcgttcggttgagtcaagagctgcagagcctagatcagtatcagactatcaaaatgcaaattcatcatattatgttgaaaatgctaatgatggttcgggctatcctgttggtacatatatcaatgcttctagtaaaggggcgccatataatttaccaactacaccatggaatacattgaaggcctctgactcaaaggaaattgctcttatgacagcgaaacaaactggagacgggtaccaatgggttattaagtttaataaaggacatgctccacatcaaaatatgatcttttggtttgcattaccagcagaccaagtgccagtaggaagaactgactttgtaacagttaattcagatggaacaaatgtacaatggagtcatggagcaggagcaggtgcaaataaaccacttcaacaaatgtgggaatatggagtaaatgatcctcatcgttcacatgactttaaaataagaaatagaagtggccaagtaatatatgactggccaactgtccatatttattctttagaagatttatctagagcgagtgattattttagtgaagctggagcgacacctgctactaaagcttttggtagacaaaattttgaatatattaatggtcaaaaacctgctgaatcaccgggtgttcctaaagtttatactttcatcggtcaaggtgatgcaagttatacaatttcatttaaaacacaaggtccaactgttaataaattgtactatgcagcaggtgggcgtgctttagagtacaatcaattatttatgtacagtcaactatacgtcgaatcaacgcaagaccatcaacaacgtcttaatggtttaagacaagtggttaatcgtacatatcgcataggtacaactaaacgtgtagaagtgagtcaaggaaatgtacaaacgaaaaaggtattagaaagtacaaacctaaatatagatgattttgttgatgatcctttaagttatgttaagacgccgagtaataaagtgttaggattttattcgaataatgcaaatactaatgcttttagaccgggtggagcccaacaattaaatgaatatcaattaagtcaattatttactgatcaaaaattacaagaagcagcaagaactagaaacccaataagattaatgattggtttcgactatcctgatgcttatggtaatagtgaaactttagttcctgttaacttaacggtattacctgaaatccaacataatattaaattctttaaaaatgacgatactcaaaatattgctgaaaaaccattttcaaaacaagctgggcatccagttttctatgtatatgcaggtaaccaagggaatgcttccgtgaatttaggtggtagcgtaacatctattcaaccattacgtattaatttaacaagtaatgagaattttacagataaagattggcaaattacaggtattccgcgtacattacacattgaaaactcgacaaatagacctaataatgccagagaacgcaatattgaacttgttggtaacttattaccaggggattactttggaacgatacgttttggacgtaaagaacaattattcgaaattcgtgttaaaccacatacaccaacaattacaacgacagctgagcaattaagaggtacagcattacaaaaagtgcctgttaatatttcgggaataccgttggatccatcggcattggtttatttagttgcaccaacaaatcaaactacgaatggtggtagtgaggcagatcaaataccatctggttatacgatacttgcgactggtacacctgatggggtgcataatacaattactatacgaccgcaagattatgttgtattcataccacctgtaggtaaacaaattagagcagtagtttattataataaagtagttgcatctaatatgagtaatgctgttactattttgccagatgacattccaccaacaatcaataatcctgttggaataaatgccaaatactatcgaggcgacgaagtcaactttacaatgggtgtctctgatagacattctggtataaaaaatacaactattacgacattgccgaatggttggacatcaaatttaacaaaagcggataagaataatggctcattatctattacaggtagagtgagtatgaatcaggcatttaacagtgatattacatttaaagtgtcagcgacagacaatgtcaataatacgacaaatgatagtcaatctaaacatgtttcaattcatgtaggtaaaattagtgaagatgctcatccgattgtattaggaaatactgagaaagttgtagtagtcaatccgactgctgtatctaatgatgaaaagcaaagcataattactgcctttatgaataaaaaccaaaatataagaggatatttagcatcaactgatccagtaactgtcgataataatggtaatgtcacattacattaccgtgatggctcatcgacaacgcttgatgctacaaatgtgatgacatacgaaccagttgtgaaacctgaataccaaactgtcaatgctgctaaaacagcaacggtaacgattgctaaaggacaatcatttagtattggtgatattaaacaatattttactttaagtaatggacaacctattccaagtggcacatttacaaatattacatctgatagaactattccaactgcacaagaagttagtcaaatgaacgcaggcacgcagttataccatataactgctacaaatgcgtatcataaagatagtgaagacttctatattagtttgaaaatcatcgatgtgaaacaaccagaaggcgatcaacgtgtatatcgtacatcaacatatgatttaactactgatgaaatctcaaaagtaaaacaagcatttattaatgcaaatagagatgtaattacgcttgccgaaggtgatatttcagttacaaatacacctaatggtgctaatgtaagtactattacagtaaatattaataaaggtcgattaacgaaatcattcgcgtcaaacctagctaatatgaatttcttgcgttgggttaatttcccacaagattatacagtgacatggacgaatgcaaaaattgcaaacagaccaacagatggtggtttatcatggtctgatgaccataaatctttaatttatcgttatgatgctacattaggtactcaaattacgacgaatgatattttaacaatgttaaaagcaacaactacagtgcctggattgcgaaataacattactggtaatgaaaaatcacaagcagaagctggcggaagacctaactttagaacgactggttattcacaatcaaatgcgacaactgatggtcaacgtcaatttacgttgaatggtcaagtgattcaagtgttagacatcatcaacccttcaaacggttatggtgggcaacctgttacaaattcaaatactcgtgcaaaccatagtaactcaactgttgttaacgtaaacgaaccggcagctaatggtgctggcgcatttacaattgaccacgttgtaaaaagtaattctacacataatgcaagtgatgcagtttataaagcacagttatacttaacgccatatggtccaaaacaatatgttgaacatttaaatcaaaatacaggaaatactactgacgctattaacatttattttgtaccaagtgacttagtgaatccaacaatttcagtaggtaattacactaatcatcaagtgttctcaggtgaaacatttacaaatactattacagcgaatgataactttggtgtgcaatctgtaactgtaccaaatacatcacaaattacaggtactgttgataataaccatcaacatgtttctgcaacggcaccaaatgtgacatcagcaactaataagacaatcaatttattagcaactgatacaagcggcaatacagctacaacttcgttcaatgtaacagtgaaacctttgcgtgataaatatcgagttggtacttcatcaacggctgctaatcctgtgagaattgccaatatttcgaataatgcgacagtatcacaagctgatcaaacgacaattattaattcgttaacgtttactgaaacagtaccaaatagaagttatgcaagagcaagtgcgaatgaaatcactagtaaaacagttagtaatgtcagtcgtactggaaataatgccaatgtcacagtaactgttacttatcaagatggaacaacatcaacagtgactgtacctgtaaagcatgtcattccagaaatcgttgcacattcgcattacactgtacaaggccaagacttcccagcaggtaatggttctagtgcatcagattactttaagttatctaatggtagtgacattgcagatgcaactattacatgggtaagtggacaagcgccaaataaagataatacacgtattggtgaagatataactgtaactgcacatatcttaattgatggcgaaacaacgccgattacgaaaacagcaacatataaagtagtaagaactgtaccgaaacatgtctttgaaacagccagaggtgttttatacccaggtgtttcagatatgtatgatgcgaaacaatatgttaagccagtaaataattcttggtcgacaaatgcgcaacatatgaatttccaatttgttggaacatatggtcctaacaaagatgttgtaggcatatctactcgtcttattagagtgacatatgataatagacaaacagaagatttaactattttatctaaagttaaacctgacccacctagaattgacgcaaactctgtgacatataaagcaggtcttacaaaccaagaaattaaagttaataacgtattaaataactcgtcagtaaaattatttaaagcagataatacaccattaaatgtcacaaatattactcatggtagcggttttagttcggttgtgacagtaagtgacgcgttaccaaatggcggaattaaagcaaaatcttcaatttcaatgaacaatgtgacgtatacgacgcaagacgaacatggtcaagttgttacagtaacaagaaatgaatctgttgattcaaatgacagtgcaacagtaacagtgacaccacaattacaagcaactactgaaggcgctgtatttattaaaggtggcgacggttttgatttcggacacgtagaaagatttattcaaaacccgccacatggggcaacggttgcatggcatgatagtccagatacatggaagaatacagtcggtaacactcataaaactgcggttgtaacattacctaatggtcaaggtacgcgtaatgttgaagttccagtcaaagtttatccagttgctaatgcaaaggcgccatcacgtgatgtgaaaggtcaaaatttgactaatggaacggatgcgatgaactacattacatttgatccaaatacaaacacaaatggtatcactgcagcatgggcaaatagacaacaaccaaataaccaacaagcaggcgtgcaacatttaaatgtcgatgtcacatatccaggtatttcagctgctaaacgagttcctgttactgttaatgtatatcaatttgaattccctcaaactacttatacgacaacggttggaggcactttagcaagtggtacgcaagcatcaggatatgcacatatgcaaaatgctactggtttaccaacagatggatttacgtataaatggaatcgtgatactacaggtacaaatgacgcaaactggtcagctatgaataaaccgaatgtggctaaagtcgttaacgcaaaatatgacgtcatctataacggacatacttttgcaacatctttaccagcgaaatttgtagtaaaagatgtgcaaccagcgaaaccaactgtgactgaaacagcggcaggagcgattacaattgcacctggagcaaaccaaacagtgaatacacatgccggtaacgtaacgacatacgctgataaattagttattaaacgtaatggtaacgttgtgacgacatttacacgtcgcaataatacgagtccatgggtgaaagaagcatctgcagcaactgtagcaggtattgctggaactaataatggtattactgttgcagcaggtactttcaaccctgctgatacaattcaagttgttgcaacgcaaggaagcggagagacagtgagtgatgagcaacgtagtgatgatttcacagttgtcgcaccacaaccgaaccaagcgactactaagatttggcaaaatggtcatattgatatcacgcctaataatccatcaggacatttaattaatccaactcaagcaatggatattgcttacactgaaaaagtgggtaatggtgcagaacatagtaagacaattaatgttgttcgtggtcaaaataatcaatggacaattgcgaataagcctgactatgtaacgttagatgcacaaactggtaaagtgacgttcaatgccaatactataaaaccaaattcatcaatcacaattactccgaaagcaggtacaggtcactcagtaagtagtaatccaagtacattaactgcaccggcagctcatactgtcaacacaactgaaattgtgaaagattatggttcaaatgtaacagcagctgaaattaacaatgcagttcaagttgctaataaacgtactgcaacgattaaaaatggcacagcaatgcctactaatttagctggtggtagcacaacgacgattcctgtgacagtaacttacaatgatggtagtactgaagaagtacaagagtccattttcacaaaagcggataaacgtgagttaatcacagctaaaaatcatttagatgatccagtaagcactgaaggtaaaaagccaggtacaattacgcagtacaataatgcaatgcataatgcgcaacaacaaatcaatactgcgaaaacagaagcacaacaagtgattaataatgagcgtgcaacaccacaacaagtttctgacgcactaactaaagttcgtgcagcacaaactaagattnatcaagctaaagcattacttcaaaataaagaagataatagccaattagtaacgtctaaaaataacttacaaagttctgtgaaccaagtaccatcaactgctggtatgacgcaacaaagtattgataactataatgcgaagaagcgtgaagcagaaactgaaataactgcagctcaacgtgttattgacaatggcgatgcaactgcacaacaaatttcagatgaaaaacatcgtgtcgataacgcattaacagcattaaaccaagcgaaacatgatttaactgcagatacacatgccttagagcaagcagtgcaacaattgaatcgcacaggtacaacgactggtaagaagccggcaagtattactgcttacaataattcgattcgtgcacttcaaagtgacttaacaagtgctaaaaatagcgctaatgctattattcaaaagccaataagaacagtacaagaagtgcaatctgcgttaacaaatgtaaatcgtgtcaatgagcgattaacgcaagcaattaatcaattagtacctttagctgataatagtgctttaaaaactgctaagacgaaacttgatgaagaaatcaataaatcagtaacgactgatggtatgacacaatcatcaatccaagcatatgaaaatgctaaacgtgcgggtcaaacagaatcaacaaatgcacaaaatgttattaacaatggtgatgcgactgaccaacaaattgccgcagaaaaaacaaaagtagaagaaaaatataatagcttaaaacaagcaattgctggattaactccagacttggcaccattacaaactgcaaaaactcagttgcaaaatgatattgatcagccaacgagtacgactggtatgacaagcgcatctattgcagcatttaatgaaaaactttcagcagctagaactaaaattcaagaaattgatcgtgtattagcctcacatccagatgttgcgacaatacgtcaaaacgtgacagcagcgaatgccgctaaatcagcacttgatcaagcacgtaatggcttaacagtcgataaagcgcctttagaaaatgcgaaaaatcaactacaacatagtattgacacgcaaacaagtacaactggtatgacacaagactctataaatgcatataatgcgaagttaacagctgcacgtaataagattcaacaaatcaatcaagtattagcaggttcaccgactgtagaacaaattaatacaaatacgtctacagcaaatcaagctaaatctgatttagatcatgcacgtcaagctttaacaccagataaagcgccgcttcaaactgcgaaaacgcaattagaacaaagcattaatcaaccaacggatacaacaggtatgacgaccgcttcgttaaatgcgtacaaccaaaaattacaagcagcgcgtcaaaagttaactgaaattaatcaagtgttgaatggcaacccaactgtccaaaatatcaatgataaagtgacagaggcaaaccaagctaaggatcaattaaatacagcacgtcaaggtttaacattagatagacagccagcgttaacaacattacatggtgcatctaacttaaaccaagcacaacaaaataatttcacgcaacaaattaatgctgctcaaaatcatgctgcgcttgaaacaattaagtctaacattacggctttaaatactgcgatgacgaaattaaaagacagtgttgcggataataatacaattaaatcagatcaaaattacactgacgcaacaccagctaataaacaagcgtatgataatgcagttaatgcggctaaaggtgtcattggagaaacgactaatccaacgatggatgttaacacagtgaaccaaaaagcagcatctgttaaatcgacgaaagatgctttagatggtcaacaaaacttacaacgtgcgaaaacagaagcaacaaatgcgattacgcatgcaagtgatttaaaccaagcacaaaagaatgcattaacacaacaagtgaatagtgcacaaaacgtgcaagcagtaaatgatattaaacaaacgactcaaagcttaaatactgctatgacaggtttaaaacgtggcgttgctaatcataaccaagtcgtacaaagtgataattatgtcaacgcagatactaataagaaaaatgattacaacaatgcatacaaccatgcgaatgacattattaatggtaatgcacaacatccagttataacaccaagtgatgttaacaatgctttatcaaatgtcacaagtaaagaacatgcattgaatggtgaagctaagttaaatgctgcgaaacaagaagcgaatactgcattaggtcatttaaacaatttaaataatgcacaacgtcaaaacttacaatcgcaaattaatggtgcgcatcaaattgatgcagttaatacaattaagcaaaatgcaacaaacttgaatagtgcaatgggtaacttaagacaagctgttgcagataaagatcaagtgaaacgtacagaagattatgcggatgcagatacagctaaacaaaatgcatataacagtgcagtttcaagtgccgaaacaatcattaatcaaacaacaaatccaacgatgtctgttgatgatgttaatcgtgcaacttcagctgttacttctaataaaaatgcattaaatggttatgaaaaattagcacaatctaaaacagatgctgcaagagcaattgatgcattaccacatttaaataatgcacaaaaagcagatgttaaatctaaaattaatgctgcatcaaatattgctggcgtaaatactgttaaacaacaaggtacagatttaaatacagcgatgggtaacttgcaaggtgcaatcaatgatgaacaaacgacgcttaatagtcaaaactatcaagatgcgacacctagtaagaaaacagcatacacaaatgcggtacaagctgcgaaagatattttaaataaatcaaatggtcaaaataaaacgaaagatcaagttactgaagcgatgaatcaagtgaattctgctaaaaataacttagatggtacgcgtttattagatcaagcgaagcaaacagcaaaacagcagttaaataatatgacgcatttaacaactgcacaaaaaacgaatttaacaaaccaaattaatagtggtactactgtcgctggtgttcaaacggttcaatcaaatgccaatacattagatcaagccatgaatacgttaagacaaagtattgccaacaaagatgcgactaaagcaagtgaagattacgtagatgctaataatgataagcaaacagcatataacaacgcagtagctgctgctgaaacgattattaatgctaatagtaatccagaaatgaatccaagtacgattacacaaaaagcagagcaagtgaatagttctaaaagggcacttaacggtgatgaaaacttagctgctgcaaaacaaaatgcgaaaacgtacttaaacacattgacaagtattacagatgctcaaaagaacaatttgattagtcaaattactagtgcgacaagagtgagtggtgttgatactgtaaaacaaaatgcgcaacatctagaccaagctatggctagcttacagaatggtattaacaacgaatctcaagtgaaatcatctgagaaatatcgtgatgctgatacaaataaacaacaagagtatgataatgctattactgcagcgaaagcgattttaaataaatcgacaggtccaaacactgcgcaaaatgcagttgaagcagcattacaacgtgttaataatgcgaaagatgcattgaatggtgatgcaaaattaattgcagctcaaaacgcagcgaaacaacatttaggtactttaacgcatatcactacagctcaacgtaatgatttaacaaatcaaatttcacaagctacaaacttagctggtgttgaatctgttaaacaaaatgcgaatagtttagatggtgctatgggtaacttacaaacggctatcaacgataagtcaggaacattagcgagccaaaacttcttggatgctgatgagcaaaaacgtaatgcatacaatcaagctgtatcagcagccgaaaccattttaaataaacaaactggaccgaatacagcgaaaacagcagtcgaacaagcacttaataatgttaataatgcgaaacatgcattaaatggtacgcaaaacttaaacaatgcgaaacaagcagcgattacagcaatcaatggcgcatctgatttaaatcaaaaacaaaaagatgcattaaaagcacaagctaatggtgctcaacgcgtatctaatgcacaagatgtacagcacaatgcgactgaactgaacacggcaatgggcacattaaaacatgccatcgcagataagacgaatacgttagcaagcagtaaatatgttaatgccgatagcactaaacaaaatgcttacacaactaaagttaccaatgctgaacatattattagcggtacgccaacggttgttacgacaccttcagaagtaacagctgcagctaatcaagtaaacagcgcgaaacaagaattaaatggtgacgaaagattacgtgaagcaaaacaaaacgccaatactgctattgatgcattaacacaattaaatacacctcaaaaagctaaattaaaagaacaagtgggacaagccaatagattagaagacgtacaaactgttcaaacaaatggacaagcattgaacaatgcaatgaaaggcttaagagatagtattgctaacgaaacaacagtcaaaacaagtcaaaactatacagacgcaagtccgaataaccaatcaacatataatagcgctgtgtcaaatgcgaaaggtatcattaatcaaactaacaatccgactatggatactagtgcgattacccaagctacaacacaagtgaataatgctaaaaatggtttaaacggtgctgaaaacttaagaaatgcacaaaacactgctaagcaaaacttaaatacattatcacacttaacaaataaccaaaaatctgccatctcatcacaaattgatcgtgcaggtcatgtgagtgaggtaactgctactaaaaatgcagcaactgagttgaatacgcaaatgggtaacttggaacaagctatccatgatcaaaacacagttaaacaaagtgttaaatttactgatgcagataaagctaaacgtgatgcgtatacaaatgcggtaagcagagctgaagcaattctgaataaaacgcaaggtgcaaatacgtctaaacaagatgttgaagcggctattcaaaatgtttcaagtgctaaaaatgcattgaatggtgatcaaaacgttacaaatgcgaagaatgcagctaaaaatgcattaaataacttaacgtcaattaataatgcacaaaaacgtgacttaacaactaaaattgatcaagcaacaactgtagctggtgttgaagctgtatctaatacgagtacacaattgaatacagcgatggctaacttgcaaaatggtattaatgataaaacaaatacactagcaagtgaaaactatcatgatgctgattcagataagaaaactgcttatactcaagccgttacgaacgcagaaaatattttaaataaaaatagtggatcaaatttagacaaaactgccgttgaaaacgcgttgtcacaagttgctaatgcgaaaggtgccctaaatggtaaccataatttagagcaagctaaatcaaatgcaaacactactataaacggacttcaacatttaacaactgctcaaaaagataaattgaaacaacaagtgcaacaagcacaaaatgttgcaggtgtagatactgttaaatcaagtgccaacacattaaatggtgctatgggtacgttaagaaatagcatacaagataacacagctacgaaaaatggccaaaactatcttgatgctacagaacgtaacaaaacaaactataacaatgctgttgatagtgctaatggcgtcattaatgcaacaagcaatccaaatatggatgctaatgcaattaaccaaatcgctacacaagtgacatcaacgaaaaatgcattagatggtacacataatttaacgcaagcgaaacaaacagcaacaaatgccatcgatggtgctactaacttaaataaagcgcaaaaagatgcgttaaaagcacaagttacaagtgcgcaacgtgttgcaaatgtaacaagtatccaacaaactgcaaatgaacttaatacagctatgggtcaattacaacatggtattgatgatgaaaatgcaacaaaacaaactcaaaaatatcgtgacgctgaacaaagtaagaaaactgcttatgatcaagctgtagctgctgcgaaagcaattttaaataaacaaacaggttcaaattcagataaagcagcagttgaccgtgcattacaacaagtaacaagtacgaaagatgcattgaatggtgatgcaaaactggcagaagcgaaagcggcagctaaacaaaacttaggcactttaaaccatattacgaatgcacaacgtactgacttagaaggccaaatcaatcaagcgacgactgttgatggcgttaatactgtaaaaacaaatgccaatacattagacggcgcaatgaatagcttacaaggttcaatcaatgataaagatgcgacattaagaaatcaaaattatcttgatgcggatgaatcaaaacgaaatgcatatacgcaagctgtcacagcggctgaaggcattttaaataaacaaactggtggtaacacatctaaagcagacgttgataatgcattaaatgcagttacaagagcgaaagcggctttaaatggtgctgacaacttaagaaatgcgaaaacttcagcaacaaatacgattgatggtttacctaacttaacacaattacaaaaagacaacttgaagcatcaagttgaacaagcgcaaaatgtagcaggtgtaaatggtgttaaagataaaggtaatacgttaaatactgccatgggtgcattacgtacaagtatccaaaatgataatacgacgaaaacaagtcaaaattatcttgatgcatctgacagcaacaaaaataattacaatactgctgtaaataatgcaaatggtgttattaatgcaacgaacaatccaaatatggatgctaatgcgattaatggcatggcaaatcaagtcaatacaacaaaagcagcgttaaatggtgcacaaaacttagctcaagctaaaacaaatgcgacgaacacaattaacaacgcacatgacttaaaccaaaaacaaaaagatgcattaaaaacacaagttaacaatgcacaacgtgtatctgatgcaaataacgttcaacacactgcaactgaattgaacagtgcgatgacagcacttaaagcagctattgctgataaagaaagaacaaaagcaagcggtaattatgtcaatgctgatcaagaaaaacgtcaagcgtatgattcaaaagtgactaacgctgaaaatatcattagtggtacaccgaatgcgacattaacagtcaatgacgtaaatagtgcggcatcacaagtcaatgcggctaaaacagcattaaatggtgataacaacttacgtgtagcgaaagagcatgccaacaatacaattgacggcttagcacaattgaataatgcacaaaaagcaaaattaaaagaacaagttcaaagtgcaactacattagatggtgttcaaactgttaaaaatagttctcaaacgttgaatacagcgatgaaaggcttaagagatagtattgcgaatgaagcaacaattaaagcaggtcaaaactacactgacgcaagtccaaataatcgtaacgagtacgacagtgcagttactgcagcaaaagcaatcattaatcaaacatcgaacccaacgatggaaccaaatactattacgcaagtaacatcacaagtgacaactaaagaacaggcattaaatggtgcgcgaaacttagctcaagctaagacaactgcgaaaaacaacttgaataacttaacatcaattaacaatgcacaaaaagatgcgttaacgcgtagcattgatggtgcaacaacagtagctggtgtaaatcaagaaactgcaaaagcaacagaattaaataacgcaatgcatagtttacaaaatggtatcaatgatgagacacaaacaaaacaaactcagaaatacctagatgcagagccaagtaagaaatcagcttatgatcaagcagtaaatgcagcgaaagcaattttaacaaaagctagtggtcaaaatgtagacaaagcagcagttgaacaagcattgcaaaatgtgaacagtacgaagacggcgttgaacggtgatgcgaaattaaatgaagctaaagcagctgcgaaacaaacgttaggtacattaacacacattaataatgcacaacgtacagcgttagacaatgaaattacacaagcaacaaatgttgaaggtgttaatacagttaaagccaaagcgcaacaattagatggtgctatgggtcaattagaaacatcaattcgtgataaagacacgacgttacaaagtcaaaattatcaagatgctgatgatgctaaacgaactgcttattctcaagcagtaaatgcagcagcaactattttaaataaaacagctggcggtaatacacctaaagcagatgttgaaagagcaatgcaagctgttacacaagcaaatactgcattaaacggtattcaaaacttagatcgtgcgaaacaggctgctaacacagcgattacaaatgcttcggacttaaatacaaaacaaaaagaagcattaaaagcacaagtaacaagtgcaggacgtgtatctgcagcaaatggtgttgaacatactgcgactgaattaaatactgcgatgacagctttaaagcgtgccattgctgataaagctgagacaaaagctagtggtaactatgtcaatgctgatgcgaataaacgtcaagcatatgatgaaaaagttacagctgccgaaaatatcgttagtggtacaccaacaccaacgttaacaccagcagatgttacaaatgcagcaacgcaagtaacgaatgctaagacgcagttaaacggtaatcataatttagaagtagcgaaacaaaatgctaacactgcaattgatggtttaacttctttaaatggtccgcaaaaagcaaaacttaaagaacaagtgggtcaagcgacgacgttgccaaatgttcaaactgttcgtgataatgcacaaacattaaacactgcaatgaaaggtctacgagatagcattgcgaatgaagcaacgattaaagcaggtcaaaactacacagatgcaagtcaaaacaaacaaactgactacaacagtgcagtcactgcagcaaaagcaatcattggtcaaacaactagtccatcaatgaatgcgcaagaaattaatcaagcgaaagaccaagtgacagctaaacaacaagcgttaaacggtcaagaaaacttaagaactgcgcaaacaaatgcgaagcaacatttgaacggcttaagtgacttaactgacgctcaaaaagatgcagtgaaacgtcaaatcgaaggtgcaacgcatgttaatgaagtaacacaagcacaaaataatgcggatgcattaaatacagctatgacgaacttgaaaaatggtattcaagatcagaatacgattaagcaaggtgttaacttcactgatgccgacgaagcgaaacgtaatgcatatacaaatgcagtgacgcaagctgaacaaattttaaataaagcacaaggtccaaatacttcaaaagacggtgtcgaaactgcgttagaaaatgtacaacgtgctaaaaacgaattgaacggtaatcaaaatgttgcgaacgctaagacaactgcgaaaaatgcattgaataacctaacatcaattaataatgcacaaaaagaagcattgaaatcacaaattgaaggtgcgacaacagttgcaggtgtaaatcaagtgtctacaacggcatctgaattaaatacagcaatgagcaacttacaaaatggtattaatgatgaagcagctacaaaagcagctcagaaatatactgatgcagatagagaaaaacaaactgcatacaatgacgctgtaacagcagctaaaacgttattagataaaacagctggttcaaatgacaataaagcagctgttgaacaagcattacaacgtgtgaatactgctaaaacagcattaaatggtgacgagcgattaaatgaagcgaagaacacagctaaacaacaagtagcgacaatgtcacacttaactgatgctcaaaaagcaaacttaacatcgcaaatcgaaagtggtacgactgttgcaggtgttcaaggtattcaagctaatgccggtactttagatcaagcaatgaatcaattaagacaaagtattgcttctaaagatgcgactaaatcaagcgaagattatcaagacgcgaatgcagatttacaaaatgcatacaatgatgcggtaactaatgctgaaggtattattagtgcaacgaataaccctgaaatgaatcctgatacaattaaccaaaaagcgagccaagtgaacagtgcgaattctgcattgaacggtgatgaaaaattagcagcagcaaaacaaactgcgaaatcagatatcagtcgtttgacagacttgaacaatgcacaacgaactgcggcaaatgctgaagtggatcaagcaccaaatcttgcagctgtcacagcggctaaaaacaaagcaacatcgttaaacacagcgatgggtaatttgaaacatgcacttgctgaaaaggataatacgaaacgtagtgtcaattacacagatgcggatcaaccaaaacaacaagcgtatgatactgcggttacacaagcagaagcaattactaatgctaatggcagcaacgcgaatgaaacacaagttcaagcagcactaaaccaattgaatcaagctaaaaatgacttgaatggtgataataaagttgctcaagcaaaagagtcagcgaaacgtgcattagcttcatatagtaacttgaataatgcgcaatcaactgcagcaactagtcaaattgacaatgcaacgacagtagcaggcgtaactgctgcacaaaatactgctaatgaattaaatacagcaatgggtcaacttcaaaatggtataaatgaccaaaacactgttaaacaacaagtgaactttacagatgctgaccaaggtaagaaagatgcttacacaaatgctgttacgaatgctcaaggtattttagataaagtacacggtcaaaatatgacgaaagcacaagttgaagctgcattaaatcaagtaacgactgctaagaatgctttaaacggtgacgcaaatgtaagacaagcaaaatcagatgcgaaagcaaacttaggtacattaacacacttaaataatgcacaaaaacaagatttaacatcacaaatcgaaggcgcaacaacagtcaacggtgtaaatggtgttaaaacgaaagcacaagacttagatggtgcaatgcaacgattacaatcagctatagcaaataaagatcaaactaaagcgagcgaaaattacatcgacgcagatccaactaagaaaacagcatttgataatgctatcacacaagctgaatcttacttaaataaagatcacggtgcgaataaagataagcaagctgttgaacaagcaattcaaagtgtaacgtctactgaaaatgctttgaacggtgacgcgaacttacaacgcgctaaaactgaagctatacaagctatcgataacttgacacatttgaatacaccacaaaaaacagcattaaaacaacaagtgaacgctgcgcaacgtgtatcaggtgtaactgatctgaaaaatagtgctacatcacttaataatgcgatggatcaattaaaacaagcaattgctgatcatgacacaattgtagctagtggtaattacactaacgcgagtcctgataagcaaggtgcttatactgatgcatataatgctgcgaaaaacattgtaaatggttcgcctaatgtgattacaaatgcagcagatgttacagcagcaacacaacgtgttaataatgctgaaacaggtttaaacggtgatacaaacttagcaactgcgaagcaacaagctaaagatgcattacgtcaaatgacacatttatctgatgcacaaaaacaaagtattactggtcaaattgatagcgcgacacaagtaactggcgttcaaagtgtgaaagacaacgcgacaaatcttgataatgcaatgaatcaacttcgaaatagtattgcgaataaagatgatgtaaaagcgagtcaaccatatgttgatgcagatagagataaacaaaatgcatacaatacagcagttacaaatgctgaaaatatcattaatgcaacgagtcagccgacacttgatccatctgcagtaacacaagcagctaatcaagtgagcactaacaaaactgcgcttaatggtgcacaaaacttagcgaataaaaagcaagaaacgactgctaacatcaaccaattaagtcatttaaataatgctcaaaagcaagatttaaatacgcaagtgacaaatgcaccaaatattagcacagtaaatcaagtgaaaactaaagctgaacaattagatcaagcaatggaacgtttaatcaacggaatccaagacaaagatcaagtgaaacaaagtgttaactttacagatgcagatccagaaaaacaaacagcatacaacaatgcggtaactgctgctgaaaatattattaatcaagcaaatggtacaaatgcgaaccaatcacaagttgaagcagcactttcaactgtaacaactacgaaacaagcgttgaatggtgatagaaaagtaacagatgctaaaaacaatgcaaaccaaacattatctacgttagataacttaaacaatgcacaaaaaggtgctgttactggaaacatcaatcaagcgcacactgtagctgaagtaacgcaagccattcaaaccgctcaggaactgaatacagcgatgggtaacttgaaaaatagcttgaatgataaagacactacacttggcagtcaaaactttgcagatgcagatccagagaagaaaaatgcatacaatgaagcggttcataatgctgaaaatattttaaataaatctacaggtacgaacgtgcctaaagatcaagttgaagcagctatgaatcaagtgaatgctacaaaagcagcgcttaatggtactcaaaaccttgaaaaagctaaacaacacgcaaatacagcaattgacggtttaagccatttaacaaatgcacaaaaagaggcattaaaacaattggtacaacaatcgactactgttgcagaagcacaaggtaatgagcaaaaagcaaacaatgttgatgcagcaatggacaaattacgtcaaagtattgcagataatgcgacaacaaaacaaaaccaaaattatactgatgcaagtcagaataaaaaggatgcgtacaataatgctgtcacaactgcacaaggtattattgatcaaactacaagtccaactttagatccgactgttatcaatcaagctgctggacaagtaagcacaactaaaaatgcattaaatggtaatgaaaacctagaggcagcgaaacaacaagcgtcacaatcattaggttcattagataacttaaataatgcgcaaaaacaaacagttactgatcaaattaatggcgcgcatactgttgatgaagcaaatcaaattaagcaaaatgcgcaaaacttaaatacagcgatgggtaacttgaaacaagcgatagctgacaaagatgctacgaaagcgacagttaacttcactgatgcagatcaagcaaaacaacaagcatataacactgctgttacaaatgctgaaaatatcatttcaaaagctaatggcggcaatgcaacacaagctgaagttgaacaagcaatcaaacaagttaatgctgcaaaacaagcattaaatggtaatgccaacgttcaacatgcaaaagacgaagcaacagcattaattaatagctctaatgaccttaaccaagcacaaaaagacgcattaaaacaacaagttcaaaatgcaactactgtagctggtgtaaacaatgttaaacaaacagcacaagagttaaacaatgctatgacacaattaaaacaaggcattgcagataaagaacaaacaaaagctgatggtaactttgtcaatgcagatcctgataagcaaaatgcatataatcaagcagtagcgaaagctgaagcattaattagtgctacgcctgatgttgtcgttacacctagcgaaattactgcagcgttaaataaagttacgcaagctaaaaatgatttaaatggtaatacaaacttagcaacggcgaaacaaaatgttcaacatgctattgatcaattgccaaacttaaaccaagcgcaacgtgatgaatacagcaaacaaatcacgcaagcaacacttgtaccaaacgtcaatgctattcaacaagcggcgacaacgcttaatgacgcgatgacacaattgaaacaaggtattgcgaataaagcacaaattaaaggtagcgagaactatcacgatgctgatactgacaagcaaacagcatatgataatgcagtaacaaaagcagaagaattgttaaaacaaacaacaaatccaacaatggatccaaatacaattcaacaagcattaactaaagtgaatgacacaaatcaagcacttaacggtaatcaaaaattagctgatgccaaacaagatgctaagacaacacttggtacactagatcatttaaatgatgctcaaaaacaagcgctaacaactcaagttgaacaagcaccagatattgcaacagttaataatgttaagcaaaatgctcaaaatctgaataatgctatgactaacttaaacaatgcattacaagataaaactgagacattaaatagcattaactttactgatgcagatcaagctaagaaagatgcttatactaatgcggtttcacatgcagaaggtattttatctaaagcaaatggcagcaatgcaagtcaaactgaagtggaacaagcgatgcaacgtgtgaacgaagcgaaacaagcattgaatggtaatgacaatgtacaacgtgcaaaagatgcagcgaaacaagtgattacaaatgcaaatgatttaaatcaagcgcaaaaagatgcattaaaacaacaagtcgatgctgcgcaaactgttgcaaatgtaaacacgattaagcaaacagcacaagatttaaatcaagcaatgacacaattgaaacaaggtattgcagataaagaccaaactaaagcaaatggtaactttgtcaatgctgatactgataagcaaaatgcttacaacaatgcggtagcacatgctgaacaaataattagtggtacaccaaatgcaaacgtggatccacaacaagtggctcaagcgttacaacaagtgaatcaagctaagggtgatttaaacggtaaccataacttacaagttgctaaagacaatgcaaatacagccattgatcagttaccaaacttaaatcaaccacaaaaaacagcattaaaagaccaagtgtcgcatgcagaacttgttacaggtgttaatgctattaagcaaaatgctgatgcgttaaataatgcaatgggtacattgaaacaacaaattcaagcgaacagtcaagtaccacagtcagttgactttacacaagcggatcaagacaaacaacaagcatataacaatgcggctaaccaagcgcaacaaatcgcaaatggcataccaacacctgtattgacgcctgatacagtaacacaagcagtgacaactatgaatcaagcgaaagatgcattaaacggtgatgaaaaattagcacaagcgaaacaagaagctttagcaaatcttgatacgttacgcgatttaaatcaaccacaacgtgatgcattacgtaaccaaatcaatcaagcacaagcgttagctacagttgaacaaactaaacaaaatgcacaaaatgtgaatacagcaatgagtaacttgaaacaaggtattgcaaacaaagatactgtcaaagcaagtgagaactatcatgatgctgatgccgataagcaaacagcatatacaaatgcagtgtctcaagcggaaggtattatcaatcaaacgacaaatccaacgcttaacccagatgaaataacacgtgcattaactcaagtgactgatgctaaaaatggcttaaacggtgaagctaaattggcaactgaaaagcaaaatgctaaagatgccgtaagtgggatgacgcatttaaacgatgctcaaaaacaagcattaaaaggtcaaatcgatcaatcgcctgaaattgctacagtgaaccaagttaaacaaacagcaacgagcctagatcaagcaatggatcaattatcacaagctattaatgataaagctcaaacattagcggacggtaattacttaaatgcagatcctgacaaacaaaatgcgtataaacaggcagtagcaaaagctgaagcattattgaataaacaaagtggtactaatgaagtacaagcacaagttgaaagcatcactaatgaagtgaacgcagcgaaacaagcattaaatggtaatgacaatttggcaaatgcaaaacaacaagcaaaacaacaattggcgaacttaacacacttaaatgatgcacaaaaacaatcatttgaaagtcaaattacacaagcgccacttgttacagatgtcactacgattaatcaaaaagcacaaacgttagatcatgcgatggaattattaagaaatagtgttgcggataatcaaacgacattagcgtctgaagattatcatgatgcaactgcgcaaagacaaaatgactataaccaagctgtaacagctgctaataatatcattaatcaaactacatcgcctacgatgaatccagatgatgttaatggtgcaacgacacaagtgaataatacgaaagttgcattagatggtgatgaaaaccttgcagcagctaaacaacaagcaaacaacagacttgatcaattagatcatttgaataatgcgcaaaagcaacagttacaatcacaaattacgcaatcatctgatattgctgcagttaatggtcacaaacaaacagcagaatctttaaatactgcgatgggtaacttaattaatgcgattgcagatcatcaagccgttgaacaacgtggtaacttcatcaatgctgatactgataaacaaactgcttataatacagcggtaaatgaagcagcagcaatgattaacaaacaaactggtcaaaatgcgaaccaaacagaagtagaacaagctattactaaagttcaaacaacacttcaagcgttaaatggagaccataatttacaagttgctaaaacaaatgcgacgcaagcaattgatgctttaacaagcttaaatgatcctcaaaaaacagcattaaaagaccaagttacagctgcaactttagtaactgcagttcatcaaattgaacaaaatgcgaatacgcttaaccaagcaatgcatggtttaagacagagcattcaagataacgcagcaactaaagcaaatagcaaatatatcaacgaagatcaaccagagcaacaaaactatgatcaagctgttcaagccgcaaataatattatcaatgaacaaactgcaacattagataataatgcgattaatcaagcagcgacaactgtgaatacaacgaaagcagcattacatggtgatgtgaagttacaaaatgataaagatcatgctaagcaaacggttagtcaattagcacatctaaacaatgcacaaaaacatatggaagatacgttaattgatagtgaaacaactagaacagcagttaagcaagatttgactgaagcacaagcattagatcaacttatggatgcattacaacaaagtattgctgacaaagatgcaacacgtgcgagcagtgcatatgtcaatgcagaaccgaataaaaaacaatcctatgatgaagcagttcaaaatgctgagtctatcattgcaggattaaataatccaactatcaataaaggtaatgtatcaagtgcgactcaagcagtaatatcatctaaaaatgcattagatggtgttgaacgattagctcaagataagcaaactgctggaaattctctaaatcatttagatcaattaacaccagctcaacaacaagcgctagaaaatcaaattaataatgcaacaactcgtggcgaagtagcacaaaaattaactgaagcacaagcacttaaccaagcaatggaagctttacgtaatagcattcaagatcaacagcaaacggaagcgggtagcaagtttatcaatgaagataaaccacaaaaagatgcttaccaagcagcagttcaaaatgcaaaagatttaattaatcaaactaacaatccaacgcttgataaagcacaagttgaacaattgacacaagctgttaaccaagctaaagataacctacacggtgatcaaaaacttgcagacgataaacaacatgcggttactgatttaaatcaattaaatggtttgaataatccgcaacgtcaagcacttgaaagccaaataaacaacgcagcaactcgtggcgaagtagcacaaaaattagctgaagcaaaagcgcttgatcaagcaatgtaa

SEQ ID NO: 7554 - protein, 8824 aa, Staphylococcus aureus
  misc_feature (2592)..(2592): Xaa can be any naturally occurring amino acid
MNYRDKIQKFSIRKYTVGTFSTVIATLVFLGFNTSQAHAAETNQPASVVKQKQQSNNEQTENRESQVQNSQNSQNGQSLSATHENEQPNISQANLVDQKVAQSSTTNDEQPASQNVNTKKDSATAATTQPDKEQSKHKQNESQSANKNGNDNRAAHVENHEANVVTASDSSDNGNVQHDRNELQAFFDANYHDYRFIDRENADSGTFNYVKGIFDKINTLLGSNDPINNKDLQLAYKELEQAVALIRTMPQRQQTSRRSNRIQTRSVESRAAEPRSVSDYQNANSSYYVENANDGSGYPVGTYINASSKGAPYNLPTTPWNTLKASDSKEIALMTAKQTGDGYQWVIKFNKGHAPHQNMIFWFALPADQVPVGRTDFVTVNSDGTNVQWSHGAGAGANKPLQQMWEYGVNDPHRSHDFKIRNRSGQVIYDWPTVHIYSLEDLSRASDYFSEAGATPATKAFGRQNFEYINGQKPAESPGVPKVYTFIGQGDASYTISFKTQGPTVNKLYYAAGGRALEYNQLFMYSQLYVESTQDHQQRLNGLRQVVNRTYRIGTTKRVEVSQGNVQTKKVLESTNLNIDDFVDDPLSYVKTPSNKVLGFYSNNANTNAFRPGGAQQLNEYQLSQLFTDQKLQEAARTRNPIRLMIGFDYPDAYGNSETLVPVNLTVLPEIQHNIKFFKNDDTQNIAEKPFSKQAGHPVFYVYAGNQGNASVNLGGSVTSIQPLRINLTSNENFTDKDWQITGIPRTLHIENSTNRPNNARERNIELVGNLLPGDYFGTIRFGRKEQLFEIRVKPHTPTITTTAEQLRGTALQKVPVNISGIPLDPSALVYLVAPTNQTTNGGSEADQIPSGYTILATGTPDGVHNTITIRPQDYVVFIPPVGKQIRAVVYYNKVVASNMSNAVTILPDDIPPTINNPVGINAKYYRGDEVNFTMGVSDRHSGIKNTTITTLPNGWTSNLTKADKNNGSLSITGRVSMNQAFNSDITFKVSATDNVNNTTNDSQSKHVSIHVGKISEDAHPIVLGNTEKVVVVNPTAVSNDEKQSIITAFMNKNQNIRGYLASTDPVTVDNNGNVTLHYRDGSSTTLDATNVMTYEPVVKPEYQTVNAAKTATVTIAKGQSFSIGDIKQYFTLSNGQPIPSGTFTNITSDRTIPTAQEVSQMNAGTQLYHITATNAYHKDSEDFYISLKIIDVKQPEGDQRVYRTSTYDLTTDEISKVKQAFINANRDVITLAEGDISVTNTPNGANVSTITVNINKGRLTKSFASNLANMNFLRWVNFPQDYTVTWTNAKIANRPTDGGLSWSDDHKSLIYRYDATLGTQITTNDILTMLKATTTVPGLRNNITGNEKSQAEAGGRPNFRTTGYSQSNATTDGQRQFTLNGQVIQVLDIINPSNGYGGQPVTNSNTRANHSNSTVVNVNEPAANGAGAFTIDHVVKSNSTHNASDAVYKAQLYLTPYGPKQYVEHLNQNTGNTTDAINIYFVPSDLVNPTISVGNYTNHQVFSGETFTNTITANDNFGVQSVTVPNTSQITGTVDNNHQHVSATAPNVTSATNKTINLLATDTSGNTATTSFNVTVKPLRDKYRVGTSSTAANPVRIANISNNATVSQADQTTIINSLTFTETVPNRSYARASANEITSKTVSNVSRTGNNANVTVTVTYQDGTTSTVTVPVKHVIPEIVAHSHYTVQGQDFPAGNGSSASDYFKLSNGSDIADATITWVSGQAPNKDNTRIGEDITVTAHILIDGETTPITKTATYKVVRTVPKHVFETARGVLYPGVSDMYDAKQYVKPVNNSWSTNAQHMNFQFVGTYGPNKDVVGISTRLIRVTYDNRQTEDLTILSKVKPDPPRIDANSVTYKAGLTNQEIKVNNVLNNSSVKLFKADNTPLNVTNITHGSGFSSVVTVSDALPNGGIKAKSSISMNNVTYTTQDEHGQVVTVTRNESVDSNDSATVTVTPQLQATTEGAVFIKGGDGFDFGHVERFIQNPPHGATVAWHDSPDTWKNTVGNTHKTAVVTLPNGQGTRNVEVPVKVYPVANAKAPSRDVKGQNLTNGTDAMNYITFDPNTNTNGITAAWANRQQPNNQQAGVQHLNVDVTYPGISAAKRVPVTVNVYQFEFPQTTYTTTVGGTLASGTQASGYAHMQNATGLPTDGFTYKWNRDTTGTNDANWSAMNKPNVAKVVNAKYDVIYNGHTFATSLPAKFVVKDVQPAKPTVTETAAGAITIAPGANQTVNTHAGNVTTYADKLVIKRNGNVVTTFTRRNNTSPWVKEASAATVAGIAGTNNGITVAAGTFNPADTIQVVATQGSGETVSDEQRSDDFTVVAPQPNQATTKIWQNGHIDITPNNPSGHLINPTQAMDIAYTEKVGNGAEHSKTINVVRGQNNQWTIANKPDYVTLDAQTGKVTFNANTIKPNSSITITPKAGTGHSVSSNPSTLTAPAAHTVNTTEIVKDYGSNVTAAEINNAVQVANKRTATIKNGTAMPTNLAGGSTTTIPVTVTYNDGSTEEVQESIFTKADKRELITAKNHLDDPVSTEGKKPGTITQYNNAMHNAQQQINTAKTEAQQVINNERATPQQVSDALTKVRAAQTKIXQAKALLQNKEDNSQLVTSKNNLQSSVNQVPSTAGMTQQSIDNYNAKKREAETEITAAQRVIDNGDATAQQISDEKHRVDNALTALNQAKHDLTADTHALEQAVQQLNRTGTTTGKKPASITAYNNSIRALQSDLTSAKNSANAIIQKPIRTVQEVQSALTNVNRVNERLTQAINQLVPLADNSALKTAKTKLDEEINKSVTTDGMTQSSIQAYENAKRAGQTESTNAQNVINNGDATDQQIAAEKTKVEEKYNSLKQAIAGLTPDLAPLQTAKTQLQNDIDQPTSTTGMTSASIAAFNEKLSAARTKIQEIDRVLASHPDVATIRQNVTAANAAKSALDQARNGLTVDKAPLENAKNQLQHSIDTQTSTTGMTQDSINAYNAKLTAARNKIQQINQVLAGSPTVEQINTNTSTANQAKSDLDHARQALTPDKAPLQTAKTQLEQSINQPTDTTGMTTASLNAYNQKLQAARQKLTEINQVLNGNPTVQNINDKVTEANQAKDQLNTARQGLTLDRQPALTTLHGASNLNQAQQNNFTQQINAAQNHAALETIKSNITALNTAMTKLKDSVADNNTIKSDQNYTDATPANKQAYDNAVNAAKGVIGETTNPTMDVNTVNQKAASVKSTKDALDGQQNLQRAKTEATNAITHASDLNQAQKNALTQQVNSAQNVQAVNDIKQTTQSLNTAMTGLKRGVANHNQVVQSDNYVNADTNKKNDYNNAYNHANDIINGNAQHPVITPSDVNNALSNVTSKEHALNGEAKLNAAKQEANTALGHLNNLNNAQRQNLQSQINGAHQIDAVNTIKQNATNLNSAMGNLRQAVADKDQVKRTEDYADADTAKQNAYNSAVSSAETIINQTTNPTMSVDDVNRATSAVTSNKNALNGYEKLAQSKTDAARAIDALPHLNNAQKADVKSKINAASNIAGVNTVKQQGTDLNTAMGNLQGAINDEQTTLNSQNYQDATPSKKTAYTNAVQAAKDILNKSNGQNKTKDQVTEAMNQVNSAKNNLDGTRLLDQAKQTAKQQLNNMTHLTTAQKTNLTNQINSGTTVAGVQTVQSNANTLDQAMNTLRQSIANKDATKASEDYVDANNDKQTAYNNAVAAAETIINANSNPEMNPSTITQKAEQVNSSKRALNGDENLAAAKQNAKTYLNTLTSITDAQKNNLISQITSATRVSGVDTVKQNAQHLDQAMASLQNGINNESQVKSSEKYRDADTNKQQEYDNAITAAKAILNKSTGPNTAQNAVEAALQRVNNAKDALNGDAKLIAAQNAAKQHLGTLTHITTAQRNDLTNQISQATNLAGVESVKQNANSLDGAMGNLQTAINDKSGTLASQNFLDADEQKRNAYNQAVSAAETILNKQTGPNTAKTAVEQALNNVNNAKHALNGTQNLNNAKQAAITAINGASDLNQKQKDALKAQANGAQRVSNAQDVQHNATELNTAMGTLKHAIADKTNTLASSKYVNADSTKQNAYTTKVTNAEHIISGTPTVVTTPSEVTAAANQVNSAKQELNGDERLREAKQNANTAIDALTQLNTPQKAKLKEQVGQANRLEDVQTVQTNGQALNNAMKGLRDSIANETTVKTSQNYTDASPNNQSTYNSAVSNAKGIINQTNNPTMDTSAITQATTQVNNAKNGLNGAENLRNAQNTAKQNLNTLSHLTNNQKSAISSQIDRAGHVSEVTATKNAATELNTQMGNLEQAIHDQNTVKQSVKFTDADKAKRDAYTNAVSRAEAILNKTQGANTSKQDVEAAIQNVSSAKNALNGDQNVTNAKNAAKNALNNLTSINNAQKRDLTTKIDQATTVAGVEAVSNTSTQLNTAMANLQNGINDKTNTLASENYHDADSDKKTAYTQAVTNAENILNKNSGSNLDKTAVENALSQVANAKGALNGNHNLEQAKSNANTTINGLQHLTTAQKDKLKQQVQQAQNVAGVDTVKSSANTLNGAMGTLRNSIQDNTATKNGQNYLDATERNKTNYNNAVDSANGVINATSNPNMDANAINQIATQVTSTKNALDGTHNLTQAKQTATNAIDGATNLNKAQKDALKAQVTSAQRVANVTSIQQTANELNTAMGQLQHGIDDENATKQTQKYRDAEQSKKTAYDQAVAAAKAILNKQTGSNSDKAAVDRALQQVTSTKDALNGDAKLAEAKAAAKQNLGTLNHITNAQRTDLEGQINQATTVDGVNTVKTNANTLDGAMNSLQGSINDKDATLRNQNYLDADESKRNAYTQAVTAAEGILNKQTGGNTSKADVDNALNAVTRAKAALNGADNLRNAKTSATNTIDGLPNLTQLQKDNLKHQVEQAQNVAGVNGVKDKGNTLNTAMGALRTSIQNDNTTKTSQNYLDASDSNKNNYNTAVNNANGVINATNNPNMDANAINGMANQVNTTKAALNGAQNLAQAKTNATNTINNAHDLNQKQKDALKTQVNNAQRVSDANNVQHTATELNSAMTALKAAIADKERTKASGNYVNADQEKRQAYDSKVTNAENIISGTPNATLTVNDVNSAASQVNAAKTALNGDNNLRVAKEHANNTIDGLAQLNNAQKAKLKEQVQSATTLDGVQTVKNSSQTLNTAMKGLRDSIANEATIKAGQNYTDASPNNRNEYDSAVTAAKAIINQTSNPTMEPNTITQVTSQVTTKEQALNGARNLAQAKTTAKNNLNNLTSINNAQKDALTRSIDGATTVAGVNQETAKATELNNAMHSLQNGINDETQTKQTQKYLDAEPSKKSAYDQAVNAAKAILTKASGQNVDKAAVEQALQNVNSTKTALNGDAKLNEAKAAAKQTLGTLTHINNAQRTALDNEITQATNVEGVNTVKAKAQQLDGAMGQLETSIRDKDTTLQSQNYQDADDAKRTAYSQAVNAAATILNKTAGGNTPKADVERAMQAVTQANTALNGIQNLDRAKQAANTAITNASDLNTKQKEALKAQVTSAGRVSAANGVEHTATELNTAMTALKRAIADKAETKASGNYVNADANKRQAYDEKVTAAENIVSGTPTPTLTPADVTNAATQVTNAKTQLNGNHNLEVAKQNANTAIDGLTSLNGPQKAKLKEQVGQATTLPNVQTVRDNAQTLNTAMKGLRDSIANEATIKAGQNYTDASQNKQTDYNSAVTAAKAIIGQTTSPSMNAQEINQAKDQVTAKQQALNGQENLRTAQTNAKQHLNGLSDLTDAQKDAVKRQIEGATHVNEVTQAQNNADALNTAMTNLKNGIQDQNTIKQGVNFTDADEAKRNAYTNAVTQAEQILNKAQGPNTSKDGVETALENVQRAKNELNGNQNVANAKTTAKNALNNLTSINNAQKEALKSQIEGATTVAGVNQVSTTASELNTAMSNLQNGINDEAATKAAQKYTDADREKQTAYNDAVTAAKTLLDKTAGSNDNKAAVEQALQRVNTAKTALNGDERLNEAKNTAKQQVATMSHLTDAQKANLTSQIESGTTVAGVQGIQANAGTLDQAMNQLRQSIASKDATKSSEDYQDANADLQNAYNDAVTNAEGIISATNNPEMNPDTINQKASQVNSANSALNGDEKLAAAKQTAKSDISRLTDLNNAQRTAANAEVDQAPNLAAVTAAKNKATSLNTAMGNLKHALAEKDNTKRSVNYTDADQPKQQAYDTAVTQAEAITNANGSNANETQVQAALNQLNQAKNDLNGDNKVAQAKESAKRALASYSNLNNAQSTAATSQIDNATTVAGVTAAQNTANELNTAMGQLQNGINDQNTVKQQVNFTDADQGKKDAYTNAVTNAQGILDKVHGQNMTKAQVEAALNQVTTAKNALNGDANVRQAKSDAKANLGTLTHLNNAQKQDLTSQIEGATTVNGVNGVKTKAQDLDGAMQRLQSAIANKDQTKASENYIDADPTKKTAFDNAITQAESYLNKDHGANKDKQAVEQAIQSVTSTENALNGDANLQRAKTEAIQAIDNLTHLNTPQKTALKQQVNAAQRVSGVTDLKNSATSLNNAMDQLKQAIADHDTIVASGNYTNASPDKQGAYTDAYNAAKNIVNGSPNVITNAADVTAATQRVNNAETGLNGDTNLATAKQQAKDALRQMTHLSDAQKQSITGQIDSATQVTGVQSVKDNATNLDNAMNQLRNSIANKDDVKASQPYVDADRDKQNAYNTAVTNAENIINATSQPTLDPSAVTQAANQVSTNKTALNGAQNLANKKQETTANINQLSHLNNAQKQDLNTQVTNAPNISTVNQVKTKAEQLDQAMERLINGIQDKDQVKQSVNFTDADPEKQTAYNNAVTAAENIINQANGTNANQSQVEAALSTVTTTKQALNGDRKVTDAKNNANQTLSTLDNLNNAQKGAVTGNINQAHTVAEVTQAIQTAQELNTAMGNLKNSLNDKDTTLGSQNFADADPEKKNAYNEAVHNAENILNKSTGTNVPKDQVEAAMNQVNATKAALNGTQNLEKAKQHANTAIDGLSHLTNAQKEALKQLVQQSTTVAEAQGNEQKANNVDAAMDKLRQSIADNATTKQNQNYTDASQNKKDAYNNAVTTAQGIIDQTTSPTLDPTVINQAAGQVSTTKNALNGNENLEAAKQQASQSLGSLDNLNNAQKQTVTDQINGAHTVDEANQIKQNAQNLNTAMGNLKQAIADKDATKATVNFTDADQAKQQAYNTAVTNAENIISKANGGNATQAEVEQAIKQVNAAKQALNGNANVQHAKDEATALINSSNDLNQAQKDALKQQVQNATTVAGVNNVKQTAQELNNAMTQLKQGIADKEQTKADGNFVNADPDKQNAYNQAVAKAEALISATPDVVVTPSEITAALNKVTQAKNDLNGNTNLATAKQNVQHAIDQLPNLNQAQRDEYSKQITQATLVPNVNAIQQAATTLNDAMTQLKQGIANKAQIKGSENYHDADTDKQTAYDNAVTKAEELLKQTTNPTMDPNTIQQALTKVNDTNQALNGNQKLADAKQDAKTTLGTLDHLNDAQKQALTTQVEQAPDIATVNNVKQNAQNLNNAMTNLNNALQDKTETLNSINFTDADQAKKDAYTNAVSHAEGILSKANGSNASQTEVEQAMQRVNEAKQALNGNDNVQRAKDAAKQVITNANDLNQAQKDALKQQVDAAQTVANVNTIKQTAQDLNQAMTQLKQGIADKDQTKANGNFVNADTDKQNAYNNAVAHAEQIISGTPNANVDPQQVAQALQQVNQAKGDLNGNHNLQVAKDNANTAIDQLPNLNQPQKTALKDQVSHAELVTGVNAIKQNADALNNAMGTLKQQIQANSQVPQSVDFTQADQDKQQAYNNAANQAQQIANGIPTPVLTPDTVTQAVTTMNQAKDALNGDEKLAQAKQEALANLDTLRDLNQPQRDALRNQINQAQALATVEQTKQNAQNVNTAMSNLKQGIANKDTVKASENYHDADADKQTAYTNAVSQAEGIINQTTNPTLNPDEITRALTQVTDAKNGLNGEAKLATEKQNAKDAVSGMTHLNDAQKQALKGQIDQSPEIATVNQVKQTATSLDQAMDQLSQAINDKAQTLADGNYLNADPDKQNAYKQAVAKAEALLNKQSGTNEVQAQVESITNEVNAAKQALNGNDNLANAKQQAKQQLANLTHLNDAQKQSFESQITQAPLVTDVTTINQKAQTLDHAMELLRNSVADNQTTLASEDYHDATAQRQNDYNQAVTAANNIINQTTSPTMNPDDVNGATTQVNNTKVALDGDENLAAAKQQANNRLDQLDHLNNAQKQQLQSQITQSSDIAAVNGHKQTAESLNTAMGNLINAIADHQAVEQRGNFINADTDKQTAYNTAVNEAAAMINKQTGQNANQTEVEQAITKVQTTLQALNGDHNLQVAKTNATQAIDALTSLNDPQKTALKDQVTAATLVTAVHQIEQNANTLNQAMHGLRQSIQDNAATKANSKYINEDQPEQQNYDQAVQAANNIINEQTATLDNNAINQAATTVNTTKAALHGDVKLQNDKDHAKQTVSQLAHLNNAQKHMEDTLIDSETTRTAVKQDLTEAQALDQLMDALQQSIADKDATRASSAYVNAEPNKKQSYDEAVQNAESIIAGLNNPTINKGNVSSATQAVISSKNALDGVERLAQDKQTAGNSLNHLDQLTPAQQQALENQINNATTRGEVAQKLTEAQALNQAMEALRNSIQDQQQTEAGSKFINEDKPQKDAYQAAVQNAKDLINQTNNPTLDKAQVEQLTQAVNQAKDNLHGDQKLADDKQHAVTDLNQLNGLNNPQRQALESQINNAATRGEVAQKLAEAKALDQAM

SEQ ID NO: 7555 - DNA, 26475 bp, Staphylococcus aureus
  misc_feature (17335)..(17335): n is a, c, g or t
gtgaattatcgtgataaaattcaaaagtttagtattcgtaaatatacagttggtacattttcaactgtcattgcgacattggtatttttaggattcaatacatcacaagcacatgctgctgaaacaaatcaaccagcaagcgtggttaaacagaaacaacaaagtaataatgaacagactgagaatcgagaatctcaagtacaaaattctcaaaattcacaaaatggtcaatcattatctgctactcatgaaaatgagcaaccaaatattagtcaagctaatttagtagatcaaaaagtagcgcaatcatctactactaatgatgaacaaccagcatctcaaaatgtaaatacaaagaaagattcggcaacggctgcgacaacacaaccagataaagaacaaagtaagcataaacaaaacgaaagtcaatctgctaataaaaatggaaacgacaatagagcggctcatgtagaaaatcatgaagcaaatgtagtaacagcttcagattcatctgataatggtaacgtacaacatgaccgaaatgaattacaagcgttttttgatgcaaattatcatgattatcgctttattgaccgtgaaaatgcagattctggcacatttaactatgtaaaaggcatttttgataagattaatacgttattaggcagtaatgatccaataaacaataaagacttgcaacttgcatacaaagaattggaacaagctgttgctttaattcgtacaatgcctcaacgtcaacagactagccgacgttcaaatagaattcaaacgcgttcggttgagtcaagagctgcagagcctagatcagtatcagactatcaaaatgcaaattcatcatattatgttgaaaatgctaatgatggttcgggctatcctgttggtacatatatcaatgcttctagtaaaggggcgccatataatttaccaactacaccatggaatacattgaaggcctctgactcaaaggaaattgctcttatgacagcgaaacaaactggagacgggtaccaatgggttattaagtttaataaaggacatgctccacatcaaaatatgatcttttggtttgcattaccagcagaccaagtgccagtaggaagaactgactttgtaacagttaattcagatggaacaaatgtacaatggagtcatggagcaggagcaggtgcaaataaaccacttcaacaaatgtgggaatatggagtaaatgatcctcatcgttcacatgactttaaaataagaaatagaagtggccaagtaatatatgactggccaactgtccatatttattctttagaagatttatctagagcgagtgattattttagtgaagctggagcgacacctgctactaaagcttttggtagacaaaattttgaatatattaatggtcaaaaacctgctgaatcaccgggtgttcctaaagtttatactttcatcggtcaaggtgatgcaagttatacaatttcatttaaaacacaaggtccaactgttaataaattgtactatgcagcaggtgggcgtgctttagagtacaatcaattatttatgtacagtcaactatacgtcgaatcaacgcaagaccatcaacaacgtcttaatggtttaagacaagtggttaatcgtacatatcgcataggtacaactaaacgtgtagaagtgagtcaaggaaatgtacaaacgaaaaaggtattagaaagtacaaacctaaatatagatgattttgttgatgatcctttaagttatgttaagacgccgagtaataaagtgttaggattttattcgaataatgcaaatactaatgcttttagaccgggtggagcccaacaattaaatgaatatcaattaagtcaattatttactgatcaaaaattacaagaagcagcaagaactagaaacccaataagattaatgattggtttcgactatcctgatgcttatggtaatagtgaaactttagttcctgttaacttaacggtattacctgaaatccaacataatattaaattctttaaaaatgacgatactcaaaatattgctgaaaaaccattttcaaaacaagctgggcatccagttttctatgtatatgcaggtaaccaagggaatgcttccgtgaatttaggtggtagcgtaacatctattcaaccattacgtattaatttaacaagtaatgagaattttacagataaagattggcaaattacaggtattccgcgtacattacacattgaaaactcgacaaatagacctaataatgccagagaacgcaatattgaacttgttggtaacttattaccaggggattactttggaacgatacgttttggacgtaaagaacaattattcgaaattcgtgttaaaccacatacaccaacaattacaacgacagctgagcaattaagaggtacagcattacaaaaagtgcctgttaatatttcgggaataccgttggatccatcggcattggtttatttagttgcaccaacaaatcaaactacgaatggtggtagtgaggcagatcaaataccatctggttatacgatacttgcgactggtacacctgatggggtgcataatacaattactatacgaccgcaagattatgttgtattcataccacctgtaggtaaacaaattagagcagtagtttattataataaagtagttgcatctaatatgagtaatgctgttactattttgccagatgacattccaccaacaatcaataatcctgttggaataaatgccaaatactatcgaggcgacgaagtcaactttacaatgggtgtctctgatagacattctggtataaaaaatacaactattacgacattgccgaatggttggacatcaaatttaacaaaagcggataagaataatggctcattatctattacaggtagagtgagtatgaatcaggcatttaacagtgatattacatttaaagtgtcagcgacagacaatgtcaataatacgacaaatgatagtcaatctaaacatgtttcaattcatgtaggtaaaattagtgaagatgctcatccgattgtattaggaaatactgagaaagttgtagtagtcaatccgactgctgtatctaatgatgaaaagcaaagcataattactgcctttatgaataaaaaccaaaatataagaggatatttagcatcaactgatccagtaactgtcgataataatggtaatgtcacattacattaccgtgatggctcatcgacaacgcttgatgctacaaatgtgatgacatacgaaccagttgtgaaacctgaataccaaactgtcaatgctgctaaaacagcaacggtaacgattgctaaaggacaatcatttagtattggtgatattaaacaatattttactttaagtaatggacaacctattccaagtggcacatttacaaatattacatctgatagaactattccaactgcacaagaagttagtcaaatgaacgcaggcacgcagttataccatataactgctacaaatgcgtatcataaagatagtgaagacttctatattagtttgaaaatcatcgatgtgaaacaaccagaaggcgatcaacgtgtatatcgtacatcaacatatgatttaactactgatgaaatctcaaaagtaaaacaagcatttattaatgcaaatagagatgtaattacgcttgccgaaggtgatatttcagttacaaatacacctaatggtgctaatgtaagtactattacagtaaatattaataaaggtcgattaacgaaatcattcgcgtcaaacctagctaatatgaatttcttgcgttgggttaatttcccacaagattatacagtgacatggacgaatgcaaaaattgcaaacagaccaacagatggtggtttatcatggtctgatgaccataaatctttaatttatcgttatgatgctacattaggtactcaaattacgacgaatgatattttaacaatgttaaaagcaacaactacagtgcctggattgcgaaataacattactggtaatgaaaaatcacaagcagaagctggcggaagacctaactttagaacgactggttattcacaatcaaatgcgacaactgatggtcaacgtcaatttacgttgaatggtcaagtgattcaagtgttagacatcatcaacccttcaaacggttatggtgggcaacctgttacaaattcaaatactcgtgcaaaccatagtaactcaactgttgttaacgtaaacgaaccggcagctaatggtgctggcgcatttacaattgaccacgttgtaaaaagtaattctacacataatgcaagtgatgcagtttataaagcacagttatacttaacgccatatggtccaaaacaatatgttgaacatttaaatcaaaatacaggaaatactactgacgctattaacatttattttgtaccaagtgacttagtgaatccaacaatttcagtaggtaattacactaatcatcaagtgttctcaggtgaaacatttacaaatactattacagcgaatgataactttggtgtgcaatctgtaactgtaccaaatacatcacaaattacaggtactgttgataataaccatcaacatgtttctgcaacggcaccaaatgtgacatcagcaactaataagacaatcaatttattagcaactgatacaagcggcaatacagctacaacttcgttcaatgtaacagtgaaacctttgcgtgataaatatcgagttggtacttcatcaacggctgctaatcctgtgagaattgccaatatttcgaataatgcgacagtatcacaagctgatcaaacgacaattattaattcgttaacgtttactgaaacagtaccaaatagaagttatgcaagagcaagtgcgaatgaaatcactagtaaaacagttagtaatgtcagtcgtactggaaataatgccaatgtcacagtaactgttacttatcaagatggaacaacatcaacagtgactgtacctgtaaagcatgtcattccagaaatcgttgcacattcgcattacactgtacaaggccaagacttcccagcaggtaatggttctagtgcatcagattactttaagttatctaatggtagtgacattgcagatgcaactattacatgggtaagtggacaagcgccaaataaagataatacacgtattggtgaagatataactgtaactgcacatatcttaattgatggcgaaacaacgccgattacgaaaacagcaacatataaagtagtaagaactgtaccgaaacatgtctttgaaacagccagaggtgttttatacccaggtgtttcagatatgtatgatgcgaaacaatatgttaagccagtaaataattcttggtcgacaaatgcgcaacatatgaatttccaatttgttggaacatatggtcctaacaaagatgttgtaggcatatctactcgtcttattagagtgacatatgataatagacaaacagaagatttaactattttatctaaagttaaacctgacccacctagaattgacgcaaactctgtgacatataaagcaggtcttacaaaccaagaaattaaagttaataacgtattaaataactcgtcagtaaaattatttaaagcagataatacaccattaaatgtcacaaatattactcatggtagcggttttagttcggttgtgacagtaagtgacgcgttaccaaatggcggaattaaagcaaaatcttcaatttcaatgaacaatgtgacgtatacgacgcaagacgaacatggtcaagttgttacagtaacaagaaatgaatctgttgattcaaatgacagtgcaacagtaacagtgacaccacaattacaagcaactactgaaggcgctgtatttattaaaggtggcgacggttttgatttcggacacgtagaaagatttattcaaaacccgccacatggggcaacggttgcatggcatgatagtccagatacatggaagaatacagtcggtaacactcataaaactgcggttgtaacattacctaatggtcaaggtacgcgtaatgttgaagttccagtcaaagtttatccagttgctaatgcaaaggcgccatcacgtgatgtgaaaggtcaaaatttgactaatggaacggatgcgatgaactacattacatttgatccaaatacaaacacaaatggtatcactgcagcatgggcaaatagacaacaaccaaataaccaacaagcaggcgtgcaacatttaaatgtcgatgtcacatatccaggtatttcagctgctaaacgagttcctgttactgttaatgtatatcaatttgaattccctcaaactacttatacgacaacggttggaggcactttagcaagtggtacgcaagcatcaggatatgcacatatgcaaaatgctactggtttaccaacagatggatttacgtataaatggaatcgtgatactacaggtacaaatgacgcaaactggtcagctatgaataaaccgaatgtggctaaagtcgttaacgcaaaatatgacgtcatctataacggacatacttttgcaacatctttaccagcgaaatttgtagtaaaagatgtgcaaccagcgaaaccaactgtgactgaaacagcggcaggagcgattacaattgcacctggagcaaaccaaacagtgaatacacatgccggtaacgtaacgacatacgctgataaattagttattaaacgtaatggtaacgttgtgacgacatttacacgtcgcaataatacgagtccatgggtgaaagaagcatctgcagcaactgtagcaggtattgctggaactaataatggtattactgttgcagcaggtactttcaaccctgctgatacaattcaagttgttgcaacgcaaggaagcggagagacagtgagtgatgagcaacgtagtgatgatttcacagttgtcgcaccacaaccgaaccaagcgactactaagatttggcaaaatggtcatattgatatcacgcctaataatccatcaggacatttaattaatccaactcaagcaatggatattgcttacactgaaaaagtgggtaatggtgcagaacatagtaagacaattaatgttgttcgtggtcaaaataatcaatggacaattgcgaataagcctgactatgtaacgttagatgcacaaactggtaaagtgacgttcaatgccaatactataaaaccaaattcatcaatcacaattactccgaaagcaggtacaggtcactcagtaagtagtaatccaagtacattaactgcaccggcagctcatactgtcaacacaactgaaattgtgaaagattatggttcaaatgtaacagcagctgaaattaacaatgcagttcaagttgctaataaacgtactgcaacgattaaaaatggcacagcaatgcctactaatttagctggtggtagcacaacgacgattcctgtgacagtaacttacaatgatggtagtactgaagaagtacaagagtccattttcacaaaagcggataaacgtgagttaatcacagctaaaaatcatttagatgatccagtaagcactgaaggtaaaaagccaggtacaattacgcagtacaataatgcaatgcataatgcgcaacaacaaatcaatactgcgaaaacagaagcacaacaagtgattaataatgagcgtgcaacaccacaacaagtttctgacgcactaactaaagttcgtgcagcacaaactaagattgatcaagctaaagcattacttcaaaataaagaagataatagccaattagtaacgtctaaaaataacttacaaagttctgtgaaccaagtaccatcaactgctggtatgacgcaacaaagtattgataactataatgcgaagaagcgtgaagcagaaactgaaataactgcagctcaacgtgttattgacaatggcgatgcaactgcacaacaaatttcagatgaaaaacatcgtgtcgataacgcattaacagcattaaaccaagcgaaacatgatttaactgcagatacacatgccttagagcaagcagtgcaacaattgaatcgcacaggtacaacgactggtaagaagccggcaagtattactgcttacaataattcgattcgtgcacttcaaagtgacttaacaagtgctaaaaatagcgctaatgctattattcaaaagccaataagaacagtacaagaagtgcaatctgcgttaacaaatgtaaatcgtgtcaatgagcgattaacgcaagcaattaatcaattagtacctttagctgataatagtgctttaaaaactgctaagacgaaacttgatgaagaaatcaataaatcagtaacgactgatggtatgacacaatcatcaatccaagcatatgaaaatgctaaacgtgcgggtcaaacagaatcaacaaatgcacaaaatgttattaacaatggtgatgcgactgaccaacaaattgccgcagaaaaaacaaaagtagaagaaaaatataatagcttaaaacaagcaattgctggattaactccagacttggcaccattacaaactgcaaaaactcagttgcaaaatgatattgatcagccaacgagtacgactggtatgacaagcgcatctattgcagcatttaatgaaaaactttcagcagctagaactaaaattcaagaaattgatcgtgtattagcctcacatccagatgttgcgacaatacgtcaaaacgtgacagcagcgaatgccgctaaatcagcacttgatcaagcacgtaatggcttaacagtcgataaagcgcctttagaaaatgcgaaaaatcaactacaacatagtattgacacgcaaacaagtacaactggtatgacacaagactctataaatgcatataatgcgaagttaacagctgcacgtaataagattcaacaaatcaatcaagtattagcaggttcaccgactgtagaacaaattaatacaaatacgtctacagcaaatcaagctaaatctgatttagatcatgcacgtcaagctttaacaccagataaagcgccgcttcaaactgcgaaaacgcaattagaacaaagcattaatcaaccaacggatacaacaggtatgacgaccgcttcgttaaatgcgtacaaccaaaaattacaagcagcgcgtcaaaagttaactgaaattaatcaagtgttgaatggcaacccaactgtccaaaatatcaatgataaagtgacagaggcaaaccaagctaaggatcaattaaatacagcacgtcaaggtttaacattagatagacagccagcgttaacaacattacatggtgcatctaacttaaaccaagcacaacaaaataatttcacgcaacaaattaatgctgctcaaaatcatgctgcgcttgaaacaattaagtctaacattacggctttaaatactgcgatgacgaaattaaaagacagtgttgcggataataatacaattaaatcagatcaaaattacactgacgcaacaccagctaataaacaagcgtatgataatgcagttaatgcggctaaaggtgtcattggagaaacgactaatccaacgatggatgttaacacagtgaaccaaaaagcagcatctgttaaatcgacgaaagatgctttagatggtcaacaaaacttacaacgtgcgaaaacagaagcaacaaatgcgattacgcatgcaagtgatttaaaccaagcacaaaagaatgcattaacacaacaagtgaatagtgcacaaaacgtgcaagcagtaaatgatattaaacaaacgactcaaagcttaaatactgctatgacaggtttaaaacgtggcgttgctaatcataaccaagtcgtacaaagtgataattatgtcaacgcagatactaataagaaaaatgattacaacaatgcatacaaccatgcgaatgacattattaatggtaatgcacaacatccagttataacaccaagtgatgttaacaatgctttatcaaatgtcacaagtaaagaacatgcattgaatggtgaagctaagttaaatgctgcgaaacaagaagcgaatactgcattaggtcatttaaacaatttaaataatgcacaacgtcaaaacttacaatcgcaaattaatggtgcgcatcaaattgatgcagttaatacaattaagcaaaatgcaacaaacttgaatagtgcaatgggtaacttaagacaagctgttgcagataaagatcaagtgaaacgtacagaagattatgcggatgcagatacagctaaacaaaatgcatataacagtgcagtttcaagtgccgaaacaatcattaatcaaacaacaaatccaacgatgtctgttgatgatgttaatcgtgcaacttcagctgttacttctaataaaaatgcattaaatggttatgaaaaattagcacaatctaaaacagatgctgcaagagcaattgatgcattaccacatttaaataatgcacaaaaagcagatgttaaatctaaaattaatgctgcatcaaatattgctggcgtaaatactgttaaacaacaaggtacagatttaaatacagcgatgggtaacttgcaaggtgcaatcaatgatgaacaaacgacgcttaatagtcaaaactatcaagatgcgacacctagtaagaaaacagcatacacaaatgcggtacaagctgcgaaagatattttaaataaatcaaatggtcaaaataaaacgaaagatcaagttactgaagcgatgaatcaagtgaattctgctaaaaataacttagatggtacgcgtttattagatcaagcgaagcaaacagcaaaacagcagttaaataatatgacgcatttaacaactgcacaaaaaacgaatttaacaaaccaaattaatagtggtactactgtcgctggtgttcaaacggttcaatcaaatgccaatacattagatcaagccatgaatacgttaagacaaagtattgccaacaaagatgcgactaaagcaagtgaagattacgtagatgctaataatgataagcaaacagcatataacaacgcagtagctgctgctgaaacgattattaatgctaatagtaatccagaaatgaatccaagtacgattacacaaaaagcagagcaagtgaatagttctaaaagggcacttaacggtgatgaaaacttagctgctgcaaaacaaaatgcgaaaacgtacttaaacacattgacaagtattacagatgctcaaaagaacaatttgattagtcaaattactagtgcgacaagagtgagtggtgttgatactgtaaaacaaaatgcgcaacatctagaccaagctatggctagcttacagaatggtattaacaacgaatctcaagtgaaatcatctgagaaatatcgtgatgctgatacaaataaacaacaagagtatgataatgctattactgcagcgaaagcgattttaaataaatcgacaggtccaaacactgcgcaaaatgcagttgaagcagcattacaacgtgttaataatgcgaaagatgcattgaatggtgatgcaaaattaattgcagctcaaaacgcagcgaaacaacatttaggtactttaacgcatatcactacagctcaacgtaatgatttaacaaatcaaatttcacaagctacaaacttagctggtgttgaatctgttaaacaaaatgcgaatagtttagatggtgctatgggtaacttacaaacggctatcaacgataagtcaggaacattagcgagccaaaacttcttggatgctgatgagcaaaaacgtaatgcatacaatcaagctgtatcagcagccgaaaccattttaaataaacaaactggaccgaatacagcgaaaacagcagtcgaacaagcacttaataatgttaataatgcgaaacatgcattaaatggtacgcaaaacttaaacaatgcgaaacaagcagcgattacagcaatcaatggcgcatctgatttaaatcaaaaacaaaaagatgcattaaaagcacaagctaatggtgctcaacgcgtatctaatgcacaagatgtacagcacaatgcgactgaactgaacacggcaatgggcacattaaaacatgccatcgcagataagacgaatacgttagcaagcagtaaatatgttaatgccgatagcactaaacaaaatgcttacacaactaaagttaccaatgctgaacatattattagcggtacgccaacggttgttacgacaccttcagaagtaacagctgcagctaatcaagtaaacagcgcgaaacaagaattaaatggtgacgaaagattacgtgaagcaaaacaaaacgccaatactgctattgatgcattaacacaattaaatacacctcaaaaagctaaattaaaagaacaagtgggacaagccaatagattagaagacgtacaaactgttcaaacaaatggacaagcattgaacaatgcaatgaaaggcttaagagatagtattgctaacgaaacaacagtcaaaacaagtcaaaactatacagacgcaagtccgaataaccaatcaacatataatagcgctgtgtcaaatgcgaaaggtatcattaatcaaactaacaatccgactatggatactagtgcgattacccaagctacaacacaagtgaataatgctaaaaatggtttaaacggtgctgaaaacttaagaaatgcacaaaacactgctaagcaaaacttaaatacattatcacacttaacaaataaccaaaaatctgccatctcatcacaaattgatcgtgcaggtcatgtgagtgaggtaactgctactaaaaatgcagcaactgagttgaatacgcaaatgggtaacttggaacaagctatccatgatcaaaacacagttaaacaaagtgttaaatttactgatgcagataaagctaaacgtgatgcgtatacaaatgcggtaagcagagctgaagcaattctgaataaaacgcaaggtgcaaatacgtctaaacaagatgttgaagcggctattcaaaatgtttcaagtgctaaaaatgcattgaatggtgatcaaaacgttacaaatgcgaagaatgcagctaaaaatgcattaaataacttaacgtcaattaataatgcacaaaaacgtgacttaacaactaaaattgatcaagcaacaactgtagctggtgttgaagctgtatctaatacgagtacacaattgaatacagcgatggctaacttgcaaaatggtattaatgataaaacaaatacactagcaagtgaaaactatcatgatgctgattcagataagaaaactgcttatactcaagccgttacgaacgcagaaaatattttaaataaaaatagtggatcaaatttagacaaaactgccgttgaaaacgcgttgtcacaagttgctaatgcgaaaggtgccctaaatggtaaccataatttagagcaagctaaatcaaatgcaaacactactataaacggacttcaacatttaacaactgctcaaaaagataaattgaaacaacaagtgcaacaagcacaaaatgttgcaggtgtagatactgttaaatcaagtgccaacacattaaatggtgctatgggtacgttaagaaatagcatacaagataacacagctacgaaaaatggccaaaactatcttgatgctacagaacgtaacaaaacaaactataacaatgctgttgatagtgctaatggcgtcattaatgcaacaagcaatccaaatatggatgctaatgcaattaaccaaatcgctacacaagtgacatcaacgaaaaatgcattagatggtacacataatttaacgcaagcgaaacaaacagcaacaaatgccatcgatggtgctactaacttaaataaagcgcaaaaagatgcgttaaaagcacaagttacaagtgcgcaacgtgttgcaaatgtaacaagtatccaacaaactgcaaatgaacttaatacagctatgggtcaattacaacatggtattgatgatgaaaatgcaacaaaacaaactcaaaaatatcgtgacgctgaacaaagtaagaaaactgcttatgatcaagctgtagctgctgcgaaagcaattttaaataaacaaacaggttcaaattcagataaagcagcagttgaccgtgcattacaacaagtaacaagtacgaaagatgcattgaatggtgatgcaaaactggcagaagcgaaagcggcagctaaacaaaacttaggcactttaaaccatattacgaatgcacaacgtactgacttagaaggccaaatcaatcaagcgacgactgttgatggcgttaatactgtaaaaacaaatgccaatacattagacggcgcaatgaatagcttacaaggttcaatcaatgataaagatgcgacattaagaaatcaaaattatcttgatgcggatgaatcaaaacgaaatgcatatacgcaagctgtcacagcggctgaaggcattttaaataaacaaactggtggtaacacatctaaagcagacgttgataatgcattaaatgcagttacaagagcgaaagcggctttaaatggtgctgacaacttaagaaatgcgaaaacttcagcaacaaatacgattgatggtttacctaacttaacacaattacaaaaagacaacttgaagcatcaagttgaacaagcgcaaaatgtagcaggtgtaaatggtgttaaagataaaggtaatacgttaaatactgccatgggtgcattacgtacaagtatccaaaatgataatacgacgaaaacaagtcaaaattatcttgatgcatctgacagcaacaaaaataattacaatactgctgtaaataatgcaaatggtgttattaatgcaacgaacaatccaaatatggatgctaatgcgattaatggcatggcaaatcaagtcaatacaacaaaagcagcgttaaatggtgcacaaaacttagctcaagctaaaacaaatgcgacgaacacaattaacaacgcacatgacttaaaccaaaaacaaaaagatgcattaaaaacacaagttaacaatgcacaacgtgtatctgatgcaaataacgttcaacacactgcaactgaattgaacagtgcgatgacagcacttaaagcagctattgctgataaagaaagaacaaaagcaagcggtaattatgtcaatgctgatcaagaaaaacgtcaagcgtatgattcaaaagtgactaacgctgaaaatatcattagtggtacaccgaatgcgacattaacagtcaatgacgtaaatagtgcggcatcacaagtcaatgcggctaaaacagcattaaatggtgataacaacttacgtgtagcgaaagagcatgccaacaatacaattgacggcttagcacaattgaataatgcacaaaaagcaaaattaaaagaacaagttcaaagtgcaactacattagatggtgttcaaactgttaaaaatagttctcaaacgttgaatacagcgatgaaaggcttaagagatagtattgcgaatgaagcaacaattaaagcaggtcaaaactacactgacgcaagtccaaataatcgtaacgagtacgacagtgcagttactgcagcaaaagcaatcattaatcaaacatcgaacccaacgatggaaccaaatactattacgcaagtaacatcacaagtgacaactaaagaacaggcattaaatggtgcgcgaaacttagctcaagctaagacaactgcgaaaaacaacttgaataacttaacatcaattaacaatgcacaaaaagatgcgttaacgcgtagcattgatggtgcaacaacagtagctggtgtaaatcaagaaactgcaaaagcaacagaattaaataacgcaatgcatagtttacaaaatggtatcaatgatgagacacaaacaaaacaaactcagaaatacctagatgcagagccaagtaagaaatcagcttatgatcaagcagtaaatgcagcgaaagcaattttaacaaaagctagtggtcaaaatgtagacaaagcagcagttgaacaagcattgcaaaatgtgaacagtacgaagacggcgttgaacggtgatgcgaaattaaatgaagctaaagcagctgcgaaacaaacgttaggtacattaacacacattaataatgcacaacgtacagcgttagacaatgaaattacacaagcaacaaatgttgaaggtgttaatacagttaaagccaaagcgcaacaattagatggtgctatgggtcaattagaaacatcaattcgtgataaagacacgacgttacaaagtcaaaattatcaagatgctgatgatgctaaacgaactgcttattctcaagcagtaaatgcagcagcaactattttaaataaaacagctggcggtaatacacctaaagcagatgttgaaagagcaatgcaagctgttacacaagcaaatactgcattaaacggtattcaaaacttagatcgtgcgaaacaggctgctaacacagcgattacaaatgcttcggacttaaatacaaaacaaaaagaagcattaaaagcacaagtaacaagtgcaggacgtgtatctgcagcaaatggtgttgaacatactgcgactgaattaaatactgcgatgacagctttaaagcgtgccattgctgataaagctgagacaaaagctagtggtaactatgtcaatgctgatgcgaataaacgtcaagcatatgatgaaaaagttacagctgccgaaaatatcgttagtggtacaccaacaccaacgttaacaccagcagatgttacaaatgcagcaacgcaagtaacgaatgctaagacgcagttaaacggtaatcataatttagaagtagcgaaacaaaatgctaacactgcaattgatggtttaacttctttaaatggtccgcaaaaagcaaaacttaaagaacaagtgggtcaagcgacgacgttgccaaatgttcaaactgttcgtgataatgcacaaacattaaacactgcaatgaaaggtctacgagatagcattgcgaatgaagcaacgattaaagcaggtcaaaactacacagatgcaagtcaaaacaaacaaactgactacaacagtgcagtcactgcagcaaaagcaatcattggtcaaacaactagtccatcaatgaatgcgcaagaaattaatcaagcgaaagaccaagtgacagctaaacaacaagcgttaaacggtcaagaaaacttaagaactgcgcaaacaaatgcgaagcaacatttgaacggcttaagtgacttaactgacgctcaaaaagatgcagtgaaacgtcaantcgaaggtgcaacgcatgttaatgaagtaacacaagcacaaaataatgcggatgcattaaatacagctatgacgaacttgaaaaatggtattcaagatcagaatacgattaagcaaggtgttaacttcactgatgccgacgaagcgaaacgtaatgcatatacaaatgcagtgacgcaagctgaacaaattttaaataaagcacaaggtccaaatacttcaaaagacggtgtcgaaactgcgttagaaaatgtacaacgtgctaaaaacgaattgaacggtaatcaaaatgttgcgaacgctaagacaactgcgaaaaatgcattgaataacctaacatcaattaataatgcacaaaaagaagcattgaaatcacaaattgaaggtgcgacaacagttgcaggtgtaaatcaagtgtctacaacggcatctgaattaaatacagcaatgagcaacttacaaaatggtattaatgatgaagcagctacaaaagcagctcagaaatatactgatgcagatagagaaaaacaaactgcatacaatgacgctgtaacagcagctaaaacgttattagataaaacagctggttcaaatgacaataaagcagctgttgaacaagcattacaacgtgtgaatactgctaaaacagcattaaatggtgacgagcgattaaatgaagcgaagaacacagctaaacaacaagtagcgacaatgtcacacttaactgatgctcaaaaagcaaacttaacatcgcaaatcgaaagtggtacgactgttgcaggtgttcaaggtattcaagctaatgccggtactttagatcaagcaatgaatcaattaagacaaagtattgcttctaaagatgcgactaaatcaagcgaagattatcaagacgcgaatgcagatttacaaaatgcatacaatgatgcggtaactaatgctgaaggtattattagtgcaacgaataaccctgaaatgaatcctgatacaattaaccaaaaagcgagccaagtgaacagtgcgaattctgcattgaacggtgatgaaaaattagcagcagcaaaacaaactgcgaaatcagatatcagtcgtttgacagacttgaacaatgcacaacgaactgcggcaaatgctgaagtggatcaagcaccaaatcttgcagctgtcacagcggctaaaaacaaagcaacatcgttaaacacagcgatgggtaatttgaaacatgcacttgctgaaaaggataatacgaaacgtagtgtcaattacacagatgcggatcaaccaaaacaacaagcgtatgatactgcggttacacaagcagaagcaattactaatgctaatggcagcaacgcgaatgaaacacaagttcaagcagcactaaaccaattgaatcaagctaaaaatgacttgaatggtgataataaagttgctcaagcaaaagagtcagcgaaacgtgcattagcttcatatagtaacttgaataatgcgcaatcaactgcagcaactagtcaaattgacaatgcaacgacagtagcaggcgtaactgctgcacaaaatactgctaatgaattaaatacagcaatgggtcaacttcaaaatggtataaatgaccaaaacactgttaaacaacaagtgaactttacagatgctgaccaaggtaagaaagatgcttacacaaatgctgttacgaatgctcaaggtattttagataaagtacacggtcaaaatatgacgaaagcacaagttgaagctgcattaaatcaagtaacgactgctaagaatgctttaaacggtgacgcaaatgtaagacaagcaaaatcagatgcgaaagcaaacttaggtacattaacacacttaaataatgcacaaaaacaagatttaacatcacaaatcgaaggcgcaacaacagtcaacggtgtaaatggtgttaaaacgaaagcacaagacttagatggtgcaatgcaacgattacaatcagctatagcaaataaagatcaaactaaagcgagcgaaaattacatcgacgcagatccaactaagaaaacagcatttgataatgctatcacacaagctgaatcttacttaaataaagatcacggtgcgaataaagataagcaagctgttgaacaagcaattcaaagtgtaacgtctactgaaaatgctttgaacggtgacgcgaacttacaacgcgctaaaactgaagctatacaagctatcgataacttgacacatttgaatacaccacaaaaaacagcattaaaacaacaagtgaacgctgcgcaacgtgtatcaggtgtaactgatctgaaaaatagtgctacatcacttaataatgcgatggatcaattaaaacaagcaattgctgatcatgacacaattgtagctagtggtaattacactaacgcgagtcctgataagcaaggtgcttatactgatgcatataatgctgcgaaaaacattgtaaatggttcgcctaatgtgattacaaatgcagcagatgttacagcagcaacacaacgtgttaataatgctgaaacaggtttaaacggtgatacaaacttagcaactgcgaagcaacaagctaaagatgcattacgtcaaatgacacatttatctgatgcacaaaaacaaagtattactggtcaaattgatagcgcgacacaagtaactggcgttcaaagtgtgaaagacaacgcgacaaatcttgataatgcaatgaatcaacttcgaaatagtattgcgaataaagatgatgtaaaagcgagtcaaccatatgttgatgcagatagagataaacaaaatgcatacaatacagcagttacaaatgctgaaaatatcattaatgcaacgagtcagccgacacttgatccatctgcagtaacacaagcagctaatcaagtgagcactaacaaaactgcgcttaatggtgcacaaaacttagcgaataaaaagcaagaaacgactgctaacatcaaccaattaagtcatttaaataatgctcaaaagcaagatttaaatacgcaagtgacaaatgcaccaaatattagcacagtaaatcaagtgaaaactaaagctgaacaattagatcaagcaatggaacgtttaatcaacggaatccaagacaaagatcaagtgaaacaaagtgttaactttacagatgcagatccagaaaaacaaacagcatacaacaatgcggtaactgctgctgaaaatattattaatcaagcaaatggtacaaatgcgaaccaatcacaagttgaagcagcactttcaactgtaacaactacgaaacaagcgttgaatggtgatagaaaagtaacagatgctaaaaacaatgcaaaccaaacattatctacgttagataacttaaacaatgcacaaaaaggtgctgttactggaaacatcaatcaagcgcacactgtagctgaagtaacgcaagccattcaaaccgctcaggaactgaatacagcgatgggtaacttgaaaaatagcttgaatgataaagacactacacttggcagtcaaaactttgcagatgcagatccagagaagaaaaatgcatacaatgaagcggttcataatgctgaaaatattttaaataaatctacaggtacgaacgtgcctaaagatcaagttgaagcagctatgaatcaagtgaatgctacaaaagcagcgcttaatggtactcaaaaccttgaaaaagctaaacaacacgcaaatacagcaattgacggtttaagccatttaacaaatgcacaaaaagaggcattaaaacaattggtacaacaatcgactactgttgcagaagcacaaggtaatgagcaaaaagcaaacaatgttgatgcagcaatggacaaattacgtcaaagtattgcagataatgcgacaacaaaacaaaaccaaaattatactgatgcaagtcagaataaaaaggatgcgtacaataatgctgtcacaactgcacaaggtattattgatcaaactacaagtccaactttagatccgactgttatcaatcaagctgctggacaagtaagcacaactaaaaatgcattaaatggtaatgaaaacctagaggcagcgaaacaacaagcgtcacaatcattaggttcattagataacttaaataatgcgcaaaaacaaacagttactgatcaaattaatggcgcgcatactgttgatgaagcaaatcaaattaagcaaaatgcgcaaaacttaaatacagcgatgggtaacttgaaacaagcgatagctgacaaagatgctacgaaagcgacagttaacttcactgatgcagatcaagcaaaacaacaagcatataacactgctgttacaaatgctgaaaatatcatttcaaaagctaatggcggcaatgcaacacaagctgaagttgaacaagcaatcaaacaagttaatgctgcaaaacaagcattaaatggtaatgccaacgttcaacatgcaaaagacgaagcaacagcattaattaatagctctaatgaccttaaccaagcacaaaaagacgcattaaaacaacaagttcaaaatgcaactactgtagctggtgtaaacaatgttaaacaaacagcacaagagttaaacaatgctatgacacaattaaaacaaggcattgcagataaagaacaaacaaaagctgatggtaactttgtcaatgcagatcctgataagcaaaatgcatataatcaagcagtagcgaaagctgaagcattaattagtgctacgcctgatgttgtcgttacacctagcgaaattactgcagcgttaaataaagttacgcaagctaaaaatgatttaaatggtaatacaaacttagcaacggcgaaacaaaatgttcaacatgctattgatcaattgccaaacttaaaccaagcgcaacgtgatgaatacagcaaacaaatcacgcaagcaacacttgtaccaaacgtcaatgctattcaacaagcggcgacaacgcttaatgacgcgatgacacaattgaaacaaggtattgcgaataaagcacaaattaaaggtagcgagaactatcacgatgctgatactgacaagcaaacagcatatgataatgcagtaacaaaagcagaagaattgttaaaacaaacaacaaatccaacaatggatccaaatacaattcaacaagcattaactaaagtgaatgacacaaatcaagcacttaacggtaatcaaaaattagctgatgccaaacaagatgctaagacaacacttggtacactagatcatttaaatgatgctcaaaaacaagcgctaacaactcaagttgaacaagcaccagatattgcaacagttaataatgttaagcaaaatgctcaaaatctgaataatgctatgactaacttaaacaatgcattacaagataaaactgagacattaaatagcattaactttactgatgcagatcaagctaagaaagatgcttatactaatgcggtttcacatgcagaaggtattttatctaaagcaaatggcagcaatgcaagtcaaactgaagtggaacaagcgatgcaacgtgtgaacgaagcgaaacaagcattgaatggtaatgacaatgtacaacgtgcaaaagatgcagcgaaacaagtgattacaaatgcaaatgatttaaatcaagcgcaaaaagatgcattaaaacaacaagtcgatgctgcgcaaactgttgcaaatgtaaacacgattaagcaaacagcacaagatttaaatcaagcaatgacacaattgaaacaaggtattgcagataaagaccaaactaaagcaaatggtaactttgtcaatgctgatactgataagcaaaatgcttacaacaatgcggtagcacatgctgaacaaataattagtggtacaccaaatgcaaacgtggatccacaacaagtggctcaagcgttacaacaagtgaatcaagctaagggtgatttaaacggtaaccataacttacaagttgctaaagacaatgcaaatacagccattgatcagttaccaaacttaaatcaaccacaaaaaacagcattaaaagaccaagtgtcgcatgcagaacttgttacaggtgttaatgctattaagcaaaatgctgatgcgttaaataatgcaatgggtacattgaaacaacaaattcaagcgaacagtcaagtaccacagtcagttgactttacacaagcggatcaagacaaacaacaagcatataacaatgcggctaaccaagcgcaacaaatcgcaaatggcataccaacacctgtattgacgcctgatacagtaacacaagcagtgacaactatgaatcaagcgaaagatgcattaaacggtgatgaaaaattagcacaagcgaaacaagaagctttagcaaatcttgatacgttacgcgatttaaatcaaccacaacgtgatgcattacgtaaccaaatcaatcaagcacaagcgttagctacagttgaacaaactaaacaaaatgcacaaaatgtgaatacagcaatgagtaacttgaaacaaggtattgcaaacaaagatactgtcaaagcaagtgagaactatcatgatgctgatgccgataagcaaacagcatatacaaatgcagtgtctcaagcggaaggtattatcaatcaaacgacaaatccaacgcttaacccagatgaaataacacgtgcattaactcaagtgactgatgctaaaaatggcttaaacggtgaagctaaattggcaactgaaaagcaaaatgctaaagatgccgtaagtgggatgacgcatttaaacgatgctcaaaaacaagcattaaaaggtcaaatcgatcaatcgcctgaaattgctacagtgaaccaagttaaacaaacagcaacgagcctagatcaagcaatggatcaattatcacaagctattaatgataaagctcaaacattagcggacggtaattacttaaatgcagatcctgacaaacaaaatgcgtataaacaggcagtagcaaaagctgaagcattattgaataaacaaagtggtactaatgaagtacaagcacaagttgaaagcatcactaatgaagtgaacgcagcgaaacaagcattaaatggtaatgacaatttggcaaatgcaaaacaacaagcaaaacaacaattggcgaacttaacacacttaaatgatgcacaaaaacaatcatttgaaagtcaaattacacaagcgccacttgttacagatgtcactacgattaatcaaaaagcacaaacgttagatcatgcgatggaattattaagaaatagtgttgcggataatcaaacgacattagcgtctgaagattatcatgatgcaactgcgcaaagacaaaatgactataaccaagctgtaacagctgctaataatatcattaatcaaactacatcgcctacgatgaatccagatgatgttaatggtgcaacgacacaagtgaataatacgaaagttgcattagatggtgatgaaaaccttgcagcagctaaacaacaagcaaacaacagacttgatcaattagatcatttgaataatgcgcaaaagcaacagttacaatcacaaattacgcaatcatctgatattgctgcagttaatggtcacaaacaaacagcagaatctttaaatactgcgatgggtaacttaattaatgcgattgcagatcatcaagccgttgaacaacgtggtaacttcatcaatgctgatactgataaacaaactgcttataatacagcggtaaatgaagcagcagcaatgattaacaaacaaactggtcaaaatgcgaaccaaacagaagtagaacaagctattactaaagttcaaacaacacttcaagcgttaaatggagaccataatttacaagttgctaaaacaaatgcgacgcaagcaattgatgctttaacaagcttaaatgatcctcaaaaaacagcattaaaagaccaagttacagctgcaactttagtaactgcagttcatcaaattgaacaaaatgcgaatacgcttaaccaagcaatgcatggtttaagacagagcattcaagataacgcagcaactaaagcaaatagcaaatatatcaacgaagatcaaccagagcaacaaaactatgatcaagctgttcaagccgcaaataatattatcaatgaacaaactgcaacattagataataatgcgattaatcaagcagcgacaactgtgaatacaacgaaagcagcattacatggtgatgtgaagttacaaaatgataaagatcatgctaagcaaacggttagtcaattagcacatctaaacaatgcacaaaaacatatggaagatacgttaattgatagtgaaacaactagaacagcagttaagcaagatttgactgaagcacaagcattagatcaacttatggatgcattacaacaaagtattgctgacaaagatgcaacacgtgcgagcagtgcatatgtcaatgcagaaccgaataaaaaacaatcctatgatgaagcagttcaaaatgctgagtctatcattgcaggattaaataatccaactatcaataaaggtaatgtatcaagtgcgactcaagcagtaatatcatctaaaaatgcattagatggtgttgaacgattagctcaagataagcaaactgctggaaattctctaaatcatttagatcaattaacaccagctcaacaacaagcgctagaaaatcaaattaataatgcaacaactcgtggcgaagtagcacaaaaattaactgaagcacaagcacttaaccaagcaatggaagctttacgtaatagcattcaagatcaacagcaaacggaagcgggtagcaagtttatcaatgaagataaaccacaaaaagatgcttaccaagcagcagttcaaaatgcaaaagatttaattaatcaaactaacaatccaacgcttgataaagcacaagttgaacaattgacacaagctgttaaccaagctaaagataacctacacggtgatcaaaaacttgcagacgataaacaacatgcggttactgatttaaatcaattaaatggtttgaataatccgcaacgtcaagcacttgaaagccaaataaacaacgcagcaactcgtggcgaagtagcacaaaaattagctgaagcaaaagcgcttgatcaagcaatgtaa

SEQ ID NO: 7556 - protein, 8824 aa, Staphylococcus aureus
  misc_feature (5779)..(5779): Xaa can be any naturally occurring amino acid
MNYRDKIQKFSIRKYTVGTFSTVIATLVFLGFNTSQAHAAETNQPASVVKQKQQSNNEQTENRESQVQNSQNSQNGQSLSATHENEQPNISQANLVDQKVAQSSTTNDEQPASQNVNTKKDSATAATTQPDKEQSKHKQNESQSANKNGNDNRAAHVENHEANVVTASDSSDNGNVQHDRNELQAFFDANYHDYRFIDRENADSGTFNYVKGIFDKINTLLGSNDPINNKDLQLAYKELEQAVALIRTMPQRQQTSRRSNRIQTRSVESRAAEPRSVSDYQNANSSYYVENANDGSGYPVGTYINASSKGAPYNLPTTPWNTLKASDSKEIALMTAKQTGDGYQWVIKFNKGHAPHQNMIFWFALPADQVPVGRTDFVTVNSDGTNVQWSHGAGAGANKPLQQMWEYGVNDPHRSHDFKIRNRSGQVIYDWPTVHIYSLEDLSRASDYFSEAGATPATKAFGRQNFEYINGQKPAESPGVPKVYTFIGQGDASYTISFKTQGPTVNKLYYAAGGRALEYNQLFMYSQLYVESTQDHQQRLNGLRQVVNRTYRIGTTKRVEVSQGNVQTKKVLESTNLNIDDFVDDPLSYVKTPSNKVLGFYSNNANTNAFRPGGAQQLNEYQLSQLFTDQKLQEAARTRNPIRLMIGFDYPDAYGNSETLVPVNLTVLPEIQHNIKFFKNDDTQNIAEKPFSKQAGHPVFYVYAGNQGNASVNLGGSVTSIQPLRINLTSNENFTDKDWQITGIPRTLHIENSTNRPNNARERNIELVGNLLPGDYFGTIRFGRKEQLFEIRVKPHTPTITTTAEQLRGTALQKVPVNISGIPLDPSALVYLVAPTNQTTNGGSEADQIPSGYTILATGTPDGVHNTITIRPQDYVVFIPPVGKQIRAVVYYNKVVASNMSNAVTILPDDIPPTINNPVGINAKYYRGDEVNFTMGVSDRHSGIKNTTITTLPNGWTSNLTKADKNNGSLSITGRVSMNQAFNSDITFKVSATDNVNNTTNDSQSKHVSIHVGKISEDAHPIVLGNTEKVVVVNPTAVSNDEKQSIITAFMNKNQNIRGYLASTDPVTVDNNGNVTLHYRDGSSTTLDATNVMTYEPVVKPEYQTVNAAKTATVTIAKGQSFSIGDIKQYFTLSNGQPIPSGTFTNITSDRTIPTAQEVSQMNAGTQLYHITATNAYHKDSEDFYISLKIIDVKQPEGDQRVYRTSTYDLTTDEISKVKQAFINANRDVITLAEGDISVTNTPNGANVSTITVNINKGRLTKSFASNLANMNFLRWVNFPQDYTVTWTNAKIANRPTDGGLSWSDDHKSLIYRYDATLGTQITTNDILTMLKATTTVPGLRNNITGNEKSQAEAGGRPNFRTTGYSQSNATTDGQRQFTLNGQVIQVLDIINPSNGYGGQPVTNSNTRANHSNSTVVNVNEPAANGAGAFTIDHVVKSNSTHNASDAVYKAQLYLTPYGPKQYVEHLNQNTGNTTDAINIYFVPSDLVNPTISVGNYTNHQVFSGETFTNTITANDNFGVQSVTVPNTSQITGTVDNNHQHVSATAPNVTSATNKTINLLATDTSGNTATTSFNVTVKPLRDKYRVGTSSTAANPVRIANISNNATVSQADQTTIINSLTFTETVPNRSYARASANEITSKTVSNVSRTGNNANVTVTVTYQDGTTSTVTVPVKHVIPEIVAHSHYTVQGQDFPAGNGSSASDYFKLSNGSDIADATITWVSGQAPNKDNTRIGEDITVTAHILIDGETTPITKTATYKVVRTVPKHVFETARGVLYPGVSDMYDAKQYVKPVNNSWSTNAQHMNFQFVGTYGPNKDVVGISTRLIRVTYDNRQTEDLTILSKVKPDPPRIDANSVTYKAGLTNQEIKVNNVLNNSSVKLFKADNTPLNVTNITHGSGFSSVVTVSDALPNGGIKAKSSISMNNVTYTTQDEHGQVVTVTRNESVDSNDSATVTVTPQLQATTEGAVFIKGGDGFDFGHVERFIQNPPHGATVAWHDSPDTWKNTVGNTHKTAVVTLPNGQGTRNVEVPVKVYPVANAKAPSRDVKGQNLTNGTDAMNYITFDPNTNTNGITAAWANRQQPNNQQAGVQHLNVDVTYPGISAAKRVPVTVNVYQFEFPQTTYTTTVGGTLASGTQASGYAHMQNATGLPTDGFTYKWNRDTTGTNDANWSAMNKPNVAKVVNAKYDVIYNGHTFATSLPAKFVVKDVQPAKPTVTETAAGAITIAPGANQTVNTHAGNVTTYADKLVIKRNGNVVTTFTRRNNTSPWVKEASAATVAGIAGTNNGITVAAGTFNPADTIQVVATQGSGETVSDEQRSDDFTVVAPQPNQATTKIWQNGHIDITPNNPSGHLINPTQAMDIAYTEKVGNGAEHSKTINVVRGQNNQWTIANKPDYVTLDAQTGKVTFNANTIKPNSSITITPKAGTGHSVSSNPSTLTAPAAHTVNTTEIVKDYGSNVTAAEINNAVQVANKRTATIKNGTAMPTNLAGGSTTTIPVTVTYNDGSTEEVQESIFTKADKRELITAKNHLDDPVSTEGKKPGTITQYNNAMHNAQQQINTAKTEAQQVINNERATPQQVSDALTKVRAAQTKIDQAKALLQNKEDNSQLVTSKNNLQSSVNQVPSTAGMTQQSIDNYNAKKREAETEITAAQRVIDNGDATAQQISDEKHRVDNALTALNQAKHDLTADTHALEQAVQQLNRTGTTTGKKPASITAYNNSIRALQSDLTSAKNSANAIIQKPIRTVQEVQSALTNVNRVNERLTQAINQLVPLADNSALKTAKTKLDEEINKSVTTDGMTQSSIQAYENAKRAGQTESTNAQNVINNGDATDQQIAAEKTKVEEKYNSLKQAIAGLTPDLAPLQTAKTQLQNDIDQPTSTTGMTSASIAAFNEKLSAARTKIQEIDRVLASHPDVATIRQNVTAANAAKSALDQARNGLTVDKAPLENAKNQLQHSIDTQTSTTGMTQDSINAYNAKLTAARNKIQQINQVLAGSPTVEQINTNTSTANQAKSDLDHARQALTPDKAPLQTAKTQLEQSINQPTDTTGMTTASLNAYNQKLQAARQKLTEINQVLNGNPTVQNINDKVTEANQAKDQLNTARQGLTLDRQPALTTLHGASNLNQAQQNNFTQQINAAQNHAALETIKSNITALNTAMTKLKDSVADNNTIKSDQNYTDATPANKQAYDNAVNAAKGVIGETTNPTMDVNTVNQKAASVKSTKDALDGQQNLQRAKTEATNAITHASDLNQAQKNALTQQVNSAQNVQAVNDIKQTTQSLNTAMTGLKRGVANHNQVVQSDNYVNADTNKKNDYNNAYNHANDIINGNAQHPVITPSDVNNALSNVTSKEHALNGEAKLNAAKQEANTALGHLNNLNNAQRQNLQSQINGAHQIDAVNTIKQNATNLNSAMGNLRQAVADKDQVKRTEDYADADTAKQNAYNSAVSSAETIINQTTNPTMSVDDVNRATSAVTSNKNALNGYEKLAQSKTDAARAIDALPHLNNAQKADVKSKINAASNIAGVNTVKQQGTDLNTAMGNLQGAINDEQTTLNSQNYQDATPSKKTAYTNAVQAAKDILNKSNGQNKTKDQVTEAMNQVNSAKNNLDGTRLLDQAKQTAKQQLNNMTHLTTAQKTNLTNQINSGTTVAGVQTVQSNANTLDQAMNTLRQSIANKDATKASEDYVDANNDKQTAYNNAVAAAETIINANSNPEMNPSTITQKAEQVNSSKRALNGDENLAAAKQNAKTYLNTLTSITDAQKNNLISQITSATRVSGVDTVKQNAQHLDQAMASLQNGINNESQVKSSEKYRDADTNKQQEYDNAITAAKAILNKSTGPNTAQNAVEAALQRVNNAKDALNGDAKLIAAQNAAKQHLGTLTHITTAQRNDLTNQISQATNLAGVESVKQNANSLDGAMGNLQTAINDKSGTLASQNFLDADEQKRNAYNQAVSAAETILNKQTGPNTAKTAVEQALNNVNNAKHALNGTQNLNNAKQAAITAINGASDLNQKQKDALKAQANGAQRVSNAQDVQHNATELNTAMGTLKHAIADKTNTLASSKYVNADSTKQNAYTTKVTNAEHIISGTPTVVTTPSEVTAAANQVNSAKQELNGDERLREAKQNANTAIDALTQLNTPQKAKLKEQVGQANRLEDVQTVQTNGQALNNAMKGLRDSIANETTVKTSQNYTDASPNNQSTYNSAVSNAKGIINQTNNPTMDTSAITQATTQVNNAKNGLNGAENLRNAQNTAKQNLNTLSHLTNNQKSAISSQIDRAGHVSEVTATKNAATELNTQMGNLEQAIHDQNTVKQSVKFTDADKAKRDAYTNAVSRAEAILNKTQGANTSKQDVEAAIQNVSSAKNALNGDQNVTNAKNAAKNALNNLTSINNAQKRDLTTKIDQATTVAGVEAVSNTSTQLNTAMANLQNGINDKTNTLASENYHDADSDKKTAYTQAVTNAENILNKNSGSNLDKTAVENALSQVANAKGALNGNHNLEQAKSNANTTINGLQHLTTAQKDKLKQQVQQAQNVAGVDTVKSSANTLNGAMGTLRNSIQDNTATKNGQNYLDATERNKTNYNNAVDSANGVINATSNPNMDANAINQIATQVTSTKNALDGTHNLTQAKQTATNAIDGATNLNKAQKDALKAQVTSAQRVANVTSIQQTANELNTAMGQLQHGIDDENATKQTQKYRDAEQSKKTAYDQAVAAAKAILNKQTGSNSDKAAVDRALQQVTSTKDALNGDAKLAEAKAAAKQNLGTLNHITNAQRTDLEGQINQATTVDGVNTVKTNANTLDGAMNSLQGSINDKDATLRNQNYLDADESKRNAYTQAVTAAEGILNKQTGGNTSKADVDNALNAVTRAKAALNGADNLRNAKTSATNTIDGLPNLTQLQKDNLKHQVEQAQNVAGVNGVKDKGNTLNTAMGALRTSIQNDNTTKTSQNYLDASDSNKNNYNTAVNNANGVINATNNPNMDANAINGMANQVNTTKAALNGAQNLAQAKTNATNTINNAHDLNQKQKDALKTQVNNAQRVSDANNVQHTATELNSAMTALKAAIADKERTKASGNYVNADQEKRQAYDSKVTNAENIISGTPNATLTVNDVNSAASQVNAAKTALNGDNNLRVAKEHANNTIDGLAQLNNAQKAKLKEQVQSATTLDGVQTVKNSSQTLNTAMKGLRDSIANEATIKAGQNYTDASPNNRNEYDSAVTAAKAIINQTSNPTMEPNTITQVTSQVTTKEQALNGARNLAQAKTTAKNNLNNLTSINNAQKDALTRSIDGATTVAGVNQETAKATELNNAMHSLQNGINDETQTKQTQKYLDAEPSKKSAYDQAVNAAKAILTKASGQNVDKAAVEQALQNVNSTKTALNGDAKLNEAKAAAKQTLGTLTHINNAQRTALDNEITQATNVEGVNTVKAKAQQLDGAMGQLETSIRDKDTTLQSQNYQDADDAKRTAYSQAVNAAATILNKTAGGNTPKADVERAMQAVTQANTALNGIQNLDRAKQAANTAITNASDLNTKQKEALKAQVTSAGRVSAANGVEHTATELNTAMTALKRAIADKAETKASGNYVNADANKRQAYDEKVTAAENIVSGTPTPTLTPADVTNAATQVTNAKTQLNGNHNLEVAKQNANTAIDGLTSLNGPQKAKLKEQVGQATTLPNVQTVRDNAQTLNTAMKGLRDSIANEATIKAGQNYTDASQNKQTDYNSAVTAAKAIIGQTTSPSMNAQEINQAKDQVTAKQQALNGQENLRTAQTNAKQHLNGLSDLTDAQKDAVKRQXEGATHVNEVTQAQNNADALNTAMTNLKNGIQDQNTIKQGVNFTDADEAKRNAYTNAVTQAEQILNKAQGPNTSKDGVETALENVQRAKNELNGNQNVANAKTTAKNALNNLTSINNAQKEALKSQIEGATTVAGVNQVSTTASELNTAMSNLQNGINDEAATKAAQKYTDADREKQTAYNDAVTAAKTLLDKTAGSNDNKAAVEQALQRVNTAKTALNGDERLNEAKNTAKQQVATMSHLTDAQKANLTSQIESGTTVAGVQGIQANAGTLDQAMNQLRQSIASKDATKSSEDYQDANADLQNAYNDAVTNAEGIISATNNPEMNPDTINQKASQVNSANSALNGDEKLAAAKQTAKSDISRLTDLNNAQRTAANAEVDQAPNLAAVTAAKNKATSLNTAMGNLKHALAEKDNTKRSVNYTDADQPKQQAYDTAVTQAEAITNANGSNANETQVQAALNQLNQAKNDLNGDNKVAQAKESAKRALASYSNLNNAQSTAATSQIDNATTVAGVTAAQNTANELNTAMGQLQNGINDQNTVKQQVNFTDADQGKKDAYTNAVTNAQGILDKVHGQNMTKAQVEAALNQVTTAKNALNGDANVRQAKSDAKANLGTLTHLNNAQKQDLTSQIEGATTVNGVNGVKTKAQDLDGAMQRLQSAIANKDQTKASENYIDADPTKKTAFDNAITQAESYLNKDHGANKDKQAVEQAIQSVTSTENALNGDANLQRAKTEAIQAIDNLTHLNTPQKTALKQQVNAAQRVSGVTDLKNSATSLNNAMDQLKQAIADHDTIVASGNYTNASPDKQGAYTDAYNAAKNIVNGSPNVITNAADVTAATQRVNNAETGLNGDTNLATAKQQAKDALRQMTHLSDAQKQSITGQIDSATQVTGVQSVKDNATNLDNAMNQLRNSIANKDDVKASQPYVDADRDKQNAYNTAVTNAENIINATSQPTLDPSAVTQAANQVSTNKTALNGAQNLANKKQETTANINQLSHLNNAQKQDLNTQVTNAPNISTVNQVKTKAEQLDQAMERLINGIQDKDQVKQSVNFTDADPEKQTAYNNAVTAAENIINQANGTNANQSQVEAALSTVTTTKQALNGDRKVTDAKNNANQTLSTLDNLNNAQKGAVTGNINQAHTVAEVTQAIQTAQELNTAMGNLKNSLNDKDTTLGSQNFADADPEKKNAYNEAVHNAENILNKSTGTNVPKDQVEAAMNQVNATKAALNGTQNLEKAKQHANTAIDGLSHLTNAQKEALKQLVQQSTTVAEAQGNEQKANNVDAAMDKLRQSIADNATTKQNQNYTDASQNKKDAYNNAVTTAQGIIDQTTSPTLDPTVINQAAGQVSTTKNALNGNENLEAAKQQASQSLGSLDNLNNAQKQTVTDQINGAHTVDEANQIKQNAQNLNTAMGNLKQAIADKDATKATVNFTDADQAKQQAYNTAVTNAENIISKANGGNATQAEVEQAIKQVNAAKQALNGNANVQHAKDEATALINSSNDLNQAQKDALKQQVQNATTVAGVNNVKQTAQELNNAMTQLKQGIADKEQTKADGNFVNADPDKQNAYNQAVAKAEALISATPDVVVTPSEITAALNKVTQAKNDLNGNTNLATAKQNVQHAIDQLPNLNQAQRDEYSKQITQATLVPNVNAIQQAATTLNDAMTQLKQGIANKAQIKGSENYHDADTDKQTAYDNAVTKAEELLKQTTNPTMDPNTIQQALTKVNDTNQALNGNQKLADAKQDAKTTLGTLDHLNDAQKQALTTQVEQAPDIATVNNVKQNAQNLNNAMTNLNNALQDKTETLNSINFTDADQAKKDAYTNAVSHAEGILSKANGSNASQTEVEQAMQRVNEAKQALNGNDNVQRAKDAAKQVITNANDLNQAQKDALKQQVDAAQTVANVNTIKQTAQDLNQAMTQLKQGIADKDQTKANGNFVNADTDKQNAYNNAVAHAEQIISGTPNANVDPQQVAQALQQVNQAKGDLNGNHNLQVAKDNANTAIDQLPNLNQPQKTALKDQVSHAELVTGVNAIKQNADALNNAMGTLKQQIQANSQVPQSVDFTQADQDKQQAYNNAANQAQQIANGIPTPVLTPDTVTQAVTTMNQAKDALNGDEKLAQAKQEALANLDTLRDLNQPQRDALRNQINQAQALATVEQTKQNAQNVNTAMSNLKQGIANKDTVKASENYHDADADKQTAYTNAVSQAEGIINQTTNPTLNPDEITRALTQVTDAKNGLNGEAKLATEKQNAKDAVSGMTHLNDAQKQALKGQIDQSPEIATVNQVKQTATSLDQAMDQLSQAINDKAQTLADGNYLNADPDKQNAYKQAVAKAEALLNKQSGTNEVQAQVESITNEVNAAKQALNGNDNLANAKQQAKQQLANLTHLNDAQKQSFESQITQAPLVTDVTTINQKAQTLDHAMELLRNSVADNQTTLASEDYHDATAQRQNDYNQAVTAANNIINQTTSPTMNPDDVNGATTQVNNTKVALDGDENLAAAKQQANNRLDQLDHLNNAQKQQLQSQITQSSDIAAVNGHKQTAESLNTAMGNLINAIADHQAVEQRGNFINADTDKQTAYNTAVNEAAAMINKQTGQNANQTEVEQAITKVQTTLQALNGDHNLQVAKTNATQAIDALTSLNDPQKTALKDQVTAATLVTAVHQIEQNANTLNQAMHGLRQSIQDNAATKANSKYINEDQPEQQNYDQAVQAANNIINEQTATLDNNAINQAATTVNTTKAALHGDVKLQNDKDHAKQTVSQLAHLNNAQKHMEDTLIDSETTRTAVKQDLTEAQALDQLMDALQQSIADKDATRASSAYVNAEPNKKQSYDEAVQNAESIIAGLNNPTINKGNVSSATQAVISSKNALDGVERLAQDKQTAGNSLNHLDQLTPAQQQALENQINNATTRGEVAQKLTEAQALNQAMEALRNSIQDQQQTEAGSKFINEDKPQKDAYQAAVQNAKDLINQTNNPTLDKAQVEQLTQAVNQAKDNLHGDQKLADDKQHAVTDLNQLNGLNNPQRQALESQINNAATRGEVAQKLAEAKALDQAM

SEQ ID NO: 7557 - DNA, 26475 bp, Staphylococcus aureus
  misc_feature (18357)..(18357): n is a, c, g or t
gtgaattatcgtgataaaattcaaaagtttagtattcgtaaatatacagttggtacattttcaactgtcattgcgacattggtatttttaggattcaatacatcacaagcacatgctgctgaaacaaatcaaccagcaagcgtggttaaacagaaacaacaaagtaataatgaacagactgagaatcgagaatctcaagtacaaaattctcaaaattcacaaaatggtcaatcattatctgctactcatgaaaatgagcaaccaaatattagtcaagctaatttagtagatcaaaaagtagcgcaatcatctactactaatgatgaacaaccagcatctcaaaatgtaaatacaaagaaagattcggcaacggctgcgacaacacaaccagataaagaacaaagtaagcataaacaaaacgaaagtcaatctgctaataaaaatggaaacgacaatagagcggctcatgtagaaaatcatgaagcaaatgtagtaacagcttcagattcatctgataatggtaacgtacaacatgaccgaaatgaattacaagcgttttttgatgcaaattatcatgattatcgctttattgaccgtgaaaatgcagattctggcacatttaactatgtaaaaggcatttttgataagattaatacgttattaggcagtaatgatccaataaacaataaagacttgcaacttgcatacaaagaattggaacaagctgttgctttaattcgtacaatgcctcaacgtcaacagactagccgacgttcaaatagaattcaaacgcgttcggttgagtcaagagctgcagagcctagatcagtatcagactatcaaaatgcaaattcatcatattatgttgaaaatgctaatgatggttcgggctatcctgttggtacatatatcaatgcttctagtaaaggggcgccatataatttaccaactacaccatggaatacattgaaggcctctgactcaaaggaaattgctcttatgacagcgaaacaaactggagacgggtaccaatgggttattaagtttaataaaggacatgctccacatcaaaatatgatcttttggtttgcattaccagcagaccaagtgccagtaggaagaactgactttgtaacagttaattcagatggaacaaatgtacaatggagtcatggagcaggagcaggtgcaaataaaccacttcaacaaatgtgggaatatggagtaaatgatcctcatcgttcacatgactttaaaataagaaatagaagtggccaagtaatatatgactggccaactgtccatatttattctttagaagatttatctagagcgagtgattattttagtgaagctggagcgacacctgctactaaagcttttggtagacaaaattttgaatatattaatggtcaaaaacctgctgaatcaccgggtgttcctaaagtttatactttcatcggtcaaggtgatgcaagttatacaatttcatttaaaacacaaggtccaactgttaataaattgtactatgcagcaggtgggcgtgctttagagtacaatcaattatttatgtacagtcaactatacgtcgaatcaacgcaagaccatcaacaacgtcttaatggtttaagacaagtggttaatcgtacatatcgcataggtacaactaaacgtgtagaagtgagtcaaggaaatgtacaaacgaaaaaggtattagaaagtacaaacctaaatatagatgattttgttgatgatcctttaagttatgttaagacgccgagtaataaagtgttaggattttattcgaataatgcaaatactaatgcttttagaccgggtggagcccaacaattaaatgaatatcaattaagtcaattatttactgatcaaaaattacaagaagcagcaagaactagaaacccaataagattaatgattggtttcgactatcctgatgcttatggtaatagtgaaactttagttcctgttaacttaacggtattacctgaaatccaacataatattaaattctttaaaaatgacgatactcaaaatattgctgaaaaaccattttcaaaacaagctgggcatccagttttctatgtatatgcaggtaaccaagggaatgcttccgtgaatttaggtggtagcgtaacatctattcaaccattacgtattaatttaacaagtaatgagaattttacagataaagattggcaaattacaggtattccgcgtacattacacattgaaaactcgacaaatagacctaataatgccagagaacgcaatattgaacttgttggtaacttattaccaggggattactttggaacgatacgttttggacgtaaagaacaattattcgaaattcgtgttaaaccacatacaccaacaattacaacgacagctgagcaattaagaggtacagcattacaaaaagtgcctgttaatatttcgggaataccgttggatccatcggcattggtttatttagttgcaccaacaaatcaaactacgaatggtggtagtgaggcagatcaaataccatctggttatacgatacttgcgactggtacacctgatggggtgcataatacaattactatacgaccgcaagattatgttgtattcataccacctgtaggtaaacaaattagagcagtagtttattataataaagtagttgcatctaatatgagtaatgctgttactattttgccagatgacattccaccaacaatcaataatcctgttggaataaatgccaaatactatcgaggcgacgaagtcaactttacaatgggtgtctctgatagacattctggtataaaaaatacaactattacgacattgccgaatggttggacatcaaatttaacaaaagcggataagaataatggctcattatctattacaggtagagtgagtatgaatcaggcatttaacagtgatattacatttaaagtgtcagcgacagacaatgtcaataatacgacaaatgatagtcaatctaaacatgtttcaattcatgtaggtaaaattagtgaagatgctcatccgattgtattaggaaatactgagaaagttgtagtagtcaatccgactgctgtatctaatgatgaaaagcaaagcataattactgcctttatgaataaaaaccaaaatataagaggatatttagcatcaactgatccagtaactgtcgataataatggtaatgtcacattacattaccgtgatggctcatcgacaacgcttgatgctacaaatgtgatgacatacgaaccagttgtgaaacctgaataccaaactgtcaatgctgctaaaacagcaacggtaacgattgctaaaggacaatcatttagtattggtgatattaaacaatattttactttaagtaatggacaacctattccaagtggcacatttacaaatattacatctgatagaactattccaactgcacaagaagttagtcaaatgaacgcaggcacgcagttataccatataactgctacaaatgcgtatcataaagatagtgaagacttctatattagtttgaaaatcatcgatgtgaaacaaccagaaggcgatcaacgtgtatatcgtacatcaacatatgatttaactactgatgaaatctcaaaagtaaaacaagcatttattaatgcaaatagagatgtaattacgcttgccgaaggtgatatttcagttacaaatacacctaatggtgctaatgtaagtactattacagtaaatattaataaaggtcgattaacgaaatcattcgcgtcaaacctagctaatatgaatttcttgcgttgggttaatttcccacaagattatacagtgacatggacgaatgcaaaaattgcaaacagaccaacagatggtggtttatcatggtctgatgaccataaatctttaatttatcgttatgatgctacattaggtactcaaattacgacgaatgatattttaacaatgttaaaagcaacaactacagtgcctggattgcgaaataacattactggtaatgaaaaatcacaagcagaagctggcggaagacctaactttagaacgactggttattcacaatcaaatgcgacaactgatggtcaacgtcaatttacgttgaatggtcaagtgattcaagtgttagacatcatcaacccttcaaacggttatggtgggcaacctgttacaaattcaaatactcgtgcaaaccatagtaactcaactgttgttaacgtaaacgaaccggcagctaatggtgctggcgcatttacaattgaccacgttgtaaaaagtaattctacacataatgcaagtgatgcagtttataaagcacagttatacttaacgccatatggtccaaaacaatatgttgaacatttaaatcaaaatacaggaaatactactgacgctattaacatttattttgtaccaagtgacttagtgaatccaacaatttcagtaggtaattacactaatcatcaagtgttctcaggtgaaacatttacaaatactattacagcgaatgataactttggtgtgcaatctgtaactgtaccaaatacatcacaaattacaggtactgttgataataaccatcaacatgtttctgcaacggcaccaaatgtgacatcagcaactaataagacaatcaatttattagcaactgatacaagcggcaatacagctacaacttcgttcaatgtaacagtgaaacctttgcgtgataaatatcgagttggtacttcatcaacggctgctaatcctgtgagaattgccaatatttcgaataatgcgacagtatcacaagctgatcaaacgacaattattaattcgttaacgtttactgaaacagtaccaaatagaagttatgcaagagcaagtgcgaatgaaatcactagtaaaacagttagtaatgtcagtcgtactggaaataatgccaatgtcacagtaactgttacttatcaagatggaacaacatcaacagtgactgtacctgtaaagcatgtcattccagaaatcgttgcacattcgcattacactgtacaaggccaagacttcccagcaggtaatggttctagtgcatcagattactttaagttatctaatggtagtgacattgcagatgcaactattacatgggtaagtggacaagcgccaaataaagataatacacgtattggtgaagatataactgtaactgcacatatcttaattgatggcgaaacaacgccgattacgaaaacagcaacatataaagtagtaagaactgtaccgaaacatgtctttgaaacagccagaggtgttttatacccaggtgtttcagatatgtatgatgcgaaacaatatgttaagccagtaaataattcttggtcgacaaatgcgcaacatatgaatttccaatttgttggaacatatggtcctaacaaagatgttgtaggcatatctactcgtcttattagagtgacatatgataatagacaaacagaagatttaactattttatctaaagttaaacctgacccacctagaattgacgcaaactctgtgacatataaagcaggtcttacaaaccaagaaattaaagttaataacgtattaaataactcgtcagtaaaattatttaaagcagataatacaccattaaatgtcacaaatattactcatggtagcggttttagttcggttgtgacagtaagtgacgcgttaccaaatggcggaattaaagcaaaatcttcaatttcaatgaacaatgtgacgtatacgacgcaagacgaacatggtcaagttgttacagtaacaagaaatgaatctgttgattcaaatgacagtgcaacagtaacagtgacaccacaattacaagcaactactgaaggcgctgtatttattaaaggtggcgacggttttgatttcggacacgtagaaagatttattcaaaacccgccacatggggcaacggttgcatggcatgatagtccagatacatggaagaatacagtcggtaacactcataaaactgcggttgtaacattacctaatggtcaaggtacgcgtaatgttgaagttccagtcaaagtttatccagttgctaatgcaaaggcgccatcacgtgatgtgaaaggtcaaaatttgactaatggaacggatgcgatgaactacattacatttgatccaaatacaaacacaaatggtatcactgcagcatgggcaaatagacaacaaccaaataaccaacaagcaggcgtgcaacatttaaatgtcgatgtcacatatccaggtatttcagctgctaaacgagttcctgttactgttaatgtatatcaatttgaattccctcaaactacttatacgacaacggttggaggcactttagcaagtggtacgcaagcatcaggatatgcacatatgcaaaatgctactggtttaccaacagatggatttacgtataaatggaatcgtgatactacaggtacaaatgacgcaaactggtcagctatgaataaaccgaatgtggctaaagtcgttaacgcaaaatatgacgtcatctataacggacatacttttgcaacatctttaccagcgaaatttgtagtaaaagatgtgcaaccagcgaaaccaactgtgactgaaacagcggcaggagcgattacaattgcacctggagcaaaccaaacagtgaatacacatgccggtaacgtaacgacatacgctgataaattagttattaaacgtaatggtaacgttgtgacgacatttacacgtcgcaataatacgagtccatgggtgaaagaagcatctgcagcaactgtagcaggtattgctggaactaataatggtattactgttgcagcaggtactttcaaccctgctgatacaattcaagttgttgcaacgcaaggaagcggagagacagtgagtgatgagcaacgtagtgatgatttcacagttgtcgcaccacaaccgaaccaagcgactactaagatttggcaaaatggtcatattgatatcacgcctaataatccatcaggacatttaattaatccaactcaagcaatggatattgcttacactgaaaaagtgggtaatggtgcagaacatagtaagacaattaatgttgttcgtggtcaaaataatcaatggacaattgcgaataagcctgactatgtaacgttagatgcacaaactggtaaagtgacgttcaatgccaatactataaaaccaaattcatcaatcacaattactccgaaagcaggtacaggtcactcagtaagtagtaatccaagtacattaactgcaccggcagctcatactgtcaacacaactgaaattgtgaaagattatggttcaaatgtaacagcagctgaaattaacaatgcagttcaagttgctaataaacgtactgcaacgattaaaaatggcacagcaatgcctactaatttagctggtggtagcacaacgacgattcctgtgacagtaacttacaatgatggtagtactgaagaagtacaagagtccattttcacaaaagcggataaacgtgagttaatcacagctaaaaatcatttagatgatccagtaagcactgaaggtaaaaagccaggtacaattacgcagtacaataatgcaatgcataatgcgcaacaacaaatcaatactgcgaaaacagaagcacaacaagtgattaataatgagcgtgcaacaccacaacaagtttctgacgcactaactaaagttcgtgcagcacaaactaagattgatcaagctaaagcattacttcaaaataaagaagataatagccaattagtaacgtctaaaaataacttacaaagttctgtgaaccaagtaccatcaactgctggtatgacgcaacaaagtattgataactataatgcgaagaagcgtgaagcagaaactgaaataactgcagctcaacgtgttattgacaatggcgatgcaactgcacaacaaatttcagatgaaaaacatcgtgtcgataacgcattaacagcattaaaccaagcgaaacatgatttaactgcagatacacatgccttagagcaagcagtgcaacaattgaatcgcacaggtacaacgactggtaagaagccggcaagtattactgcttacaataattcgattcgtgcacttcaaagtgacttaacaagtgctaaaaatagcgctaatgctattattcaaaagccaataagaacagtacaagaagtgcaatctgcgttaacaaatgtaaatcgtgtcaatgagcgattaacgcaagcaattaatcaattagtacctttagctgataatagtgctttaaaaactgctaagacgaaacttgatgaagaaatcaataaatcagtaacgactgatggtatgacacaatcatcaatccaagcatatgaaaatgctaaacgtgcgggtcaaacagaatcaacaaatgcacaaaatgttattaacaatggtgatgcgactgaccaacaaattgccgcagaaaaaacaaaagtagaagaaaaatataatagcttaaaacaagcaattgctggattaactccagacttggcaccattacaaactgcaaaaactcagttgcaaaatgatattgatcagccaacgagtacgactggtatgacaagcgcatctattgcagcatttaatgaaaaactttcagcagctagaactaaaattcaagaaattgatcgtgtattagcctcacatccagatgttgcgacaatacgtcaaaacgtgacagcagcgaatgccgctaaatcagcacttgatcaagcacgtaatggcttaacagtcgataaagcgcctttagaaaatgcgaaaaatcaactacaacatagtattgacacgcaaacaagtacaactggtatgacacaagactctataaatgcatataatgcgaagttaacagctgcacgtaataagattcaacaaatcaatcaagtattagcaggttcaccgactgtagaacaaattaatacaaatacgtctacagcaaatcaagctaaatctgatttagatcatgcacgtcaagctttaacaccagataaagcgccgcttcaaactgcgaaaacgcaattagaacaaagcattaatcaaccaacggatacaacaggtatgacgaccgcttcgttaaatgcgtacaaccaaaaattacaagcagcgcgtcaaaagttaactgaaattaatcaagtgttgaatggcaacccaactgtccaaaatatcaatgataaagtgacagaggcaaaccaagctaaggatcaattaaatacagcacgtcaaggtttaacattagatagacagccagcgttaacaacattacatggtgcatctaacttaaaccaagcacaacaaaataatttcacgcaacaaattaatgctgctcaaaatcatgctgcgcttgaaacaattaagtctaacattacggctttaaatactgcgatgacgaaattaaaagacagtgttgcggataataatacaattaaatcagatcaaaattacactgacgcaacaccagctaataaacaagcgtatgataatgcagttaatgcggctaaaggtgtcattggagaaacgactaatccaacgatggatgttaacacagtgaaccaaaaagcagcatctgttaaatcgacgaaagatgctttagatggtcaacaaaacttacaacgtgcgaaaacagaagcaacaaatgcgattacgcatgcaagtgatttaaaccaagcacaaaagaatgcattaacacaacaagtgaatagtgcacaaaacgtgcaagcagtaaatgatattaaacaaacgactcaaagcttaaatactgctatgacaggtttaaaacgtggcgttgctaatcataaccaagtcgtacaaagtgataattatgtcaacgcagatactaataagaaaaatgattacaacaatgcatacaaccatgcgaatgacattattaatggtaatgcacaacatccagttataacaccaagtgatgttaacaatgctttatcaaatgtcacaagtaaagaacatgcattgaatggtgaagctaagttaaatgctgcgaaacaagaagcgaatactgcattaggtcatttaaacaatttaaataatgcacaacgtcaaaacttacaatcgcaaattaatggtgcgcatcaaattgatgcagttaatacaattaagcaaaatgcaacaaacttgaatagtgcaatgggtaacttaagacaagctgttgcagataaagatcaagtgaaacgtacagaagattatgcggatgcagatacagctaaacaaaatgcatataacagtgcagtttcaagtgccgaaacaatcattaatcaaacaacaaatccaacgatgtctgttgatgatgttaatcgtgcaacttcagctgttacttctaataaaaatgcattaaatggttatgaaaaattagcacaatctaaaacagatgctgcaagagcaattgatgcattaccacatttaaataatgcacaaaaagcagatgttaaatctaaaattaatgctgcatcaaatattgctggcgtaaatactgttaaacaacaaggtacagatttaaatacagcgatgggtaacttgcaaggtgcaatcaatgatgaacaaacgacgcttaatagtcaaaactatcaagatgcgacacctagtaagaaaacagcatacacaaatgcggtacaagctgcgaaagatattttaaataaatcaaatggtcaaaataaaacgaaagatcaagttactgaagcgatgaatcaagtgaattctgctaaaaataacttagatggtacgcgtttattagatcaagcgaagcaaacagcaaaacagcagttaaataatatgacgcatttaacaactgcacaaaaaacgaatttaacaaaccaaattaatagtggtactactgtcgctggtgttcaaacggttcaatcaaatgccaatacattagatcaagccatgaatacgttaagacaaagtattgccaacaaagatgcgactaaagcaagtgaagattacgtagatgctaataatgataagcaaacagcatataacaacgcagtagctgctgctgaaacgattattaatgctaatagtaatccagaaatgaatccaagtacgattacacaaaaagcagagcaagtgaatagttctaaaagggcacttaacggtgatgaaaacttagctgctgcaaaacaaaatgcgaaaacgtacttaaacacattgacaagtattacagatgctcaaaagaacaatttgattagtcaaattactagtgcgacaagagtgagtggtgttgatactgtaaaacaaaatgcgcaacatctagaccaagctatggctagcttacagaatggtattaacaacgaatctcaagtgaaatcatctgagaaatatcgtgatgctgatacaaataaacaacaagagtatgataatgctattactgcagcgaaagcgattttaaataaatcgacaggtccaaacactgcgcaaaatgcagttgaagcagcattacaacgtgttaataatgcgaaagatgcattgaatggtgatgcaaaattaattgcagctcaaaacgcagcgaaacaacatttaggtactttaacgcatatcactacagctcaacgtaatgatttaacaaatcaaatttcacaagctacaaacttagctggtgttgaatctgttaaacaaaatgcgaatagtttagatggtgctatgggtaacttacaaacggctatcaacgataagtcaggaacattagcgagccaaaacttcttggatgctgatgagcaaaaacgtaatgcatacaatcaagctgtatcagcagccgaaaccattttaaataaacaaactggaccgaatacagcgaaaacagcagtcgaacaagcacttaataatgttaataatgcgaaacatgcattaaatggtacgcaaaacttaaacaatgcgaaacaagcagcgattacagcaatcaatggcgcatctgatttaaatcaaaaacaaaaagatgcattaaaagcacaagctaatggtgctcaacgcgtatctaatgcacaagatgtacagcacaatgcgactgaactgaacacggcaatgggcacattaaaacatgccatcgcagataagacgaatacgttagcaagcagtaaatatgttaatgccgatagcactaaacaaaatgcttacacaactaaagttaccaatgctgaacatattattagcggtacgccaacggttgttacgacaccttcagaagtaacagctgcagctaatcaagtaaacagcgcgaaacaagaattaaatggtgacgaaagattacgtgaagcaaaacaaaacgccaatactgctattgatgcattaacacaattaaatacacctcaaaaagctaaattaaaagaacaagtgggacaagccaatagattagaagacgtacaaactgttcaaacaaatggacaagcattgaacaatgcaatgaaaggcttaagagatagtattgctaacgaaacaacagtcaaaacaagtcaaaactatacagacgcaagtccgaataaccaatcaacatataatagcgctgtgtcaaatgcgaaaggtatcattaatcaaactaacaatccgactatggatactagtgcgattacccaagctacaacacaagtgaataatgctaaaaatggtttaaacggtgctgaaaacttaagaaatgcacaaaacactgctaagcaaaacttaaatacattatcacacttaacaaataaccaaaaatctgccatctcatcacaaattgatcgtgcaggtcatgtgagtgaggtaactgctactaaaaatgcagcaactgagttgaatacgcaaatgggtaacttggaacaagctatccatgatcaaaacacagttaaacaaagtgttaaatttactgatgcagataaagctaaacgtgatgcgtatacaaatgcggtaagcagagctgaagcaattctgaataaaacgcaaggtgcaaatacgtctaaacaagatgttgaagcggctattcaaaatgtttcaagtgctaaaaatgcattgaatggtgatcaaaacgttacaaatgcgaagaatgcagctaaaaatgcattaaataacttaacgtcaattaataatgcacaaaaacgtgacttaacaactaaaattgatcaagcaacaactgtagctggtgttgaagctgtatctaatacgagtacacaattgaatacagcgatggctaacttgcaaaatggtattaatgataaaacaaatacactagcaagtgaaaactatcatgatgctgattcagataagaaaactgcttatactcaagccgttacgaacgcagaaaatattttaaataaaaatagtggatcaaatttagacaaaactgccgttgaaaacgcgttgtcacaagttgctaatgcgaaaggtgccctaaatggtaaccataatttagagcaagctaaatcaaatgcaaacactactataaacggacttcaacatttaacaactgctcaaaaagataaattgaaacaacaagtgcaacaagcacaaaatgttgcaggtgtagatactgttaaatcaagtgccaacacattaaatggtgctatgggtacgttaagaaatagcatacaagataacacagctacgaaaaatggccaaaactatcttgatgctacagaacgtaacaaaacaaactataacaatgctgttgatagtgctaatggcgtcattaatgcaacaagcaatccaaatatggatgctaatgcaattaaccaaatcgctacacaagtgacatcaacgaaaaatgcattagatggtacacataatttaacgcaagcgaaacaaacagcaacaaatgccatcgatggtgctactaacttaaataaagcgcaaaaagatgcgttaaaagcacaagttacaagtgcgcaacgtgttgcaaatgtaacaagtatccaacaaactgcaaatgaacttaatacagctatgggtcaattacaacatggtattgatgatgaaaatgcaacaaaacaaactcaaaaatatcgtgacgctgaacaaagtaagaaaactgcttatgatcaagctgtagctgctgcgaaagcaattttaaataaacaaacaggttcaaattcagataaagcagcagttgaccgtgcattacaacaagtaacaagtacgaaagatgcattgaatggtgatgcaaaactggcagaagcgaaagcggcagctaaacaaaacttaggcactttaaaccatattacgaatgcacaacgtactgacttagaaggccaaatcaatcaagcgacgactgttgatggcgttaatactgtaaaaacaaatgccaatacattagacggcgcaatgaatagcttacaaggttcaatcaatgataaagatgcgacattaagaaatcaaaattatcttgatgcggatgaatcaaaacgaaatgcatatacgcaagctgtcacagcggctgaaggcattttaaataaacaaactggtggtaacacatctaaagcagacgttgataatgcattaaatgcagttacaagagcgaaagcggctttaaatggtgctgacaacttaagaaatgcgaaaacttcagcaacaaatacgattgatggtttacctaacttaacacaattacaaaaagacaacttgaagcatcaagttgaacaagcgcaaaatgtagcaggtgtaaatggtgttaaagataaaggtaatacgttaaatactgccatgggtgcattacgtacaagtatccaaaatgataatacgacgaaaacaagtcaaaattatcttgatgcatctgacagcaacaaaaataattacaatactgctgtaaataatgcaaatggtgttattaatgcaacgaacaatccaaatatggatgctaatgcgattaatggcatggcaaatcaagtcaatacaacaaaagcagcgttaaatggtgcacaaaacttagctcaagctaaaacaaatgcgacgaacacaattaacaacgcacatgacttaaaccaaaaacaaaaagatgcattaaaaacacaagttaacaatgcacaacgtgtatctgatgcaaataacgttcaacacactgcaactgaattgaacagtgcgatgacagcacttaaagcagctattgctgataaagaaagaacaaaagcaagcggtaattatgtcaatgctgatcaagaaaaacgtcaagcgtatgattcaaaagtgactaacgctgaaaatatcattagtggtacaccgaatgcgacattaacagtcaatgacgtaaatagtgcggcatcacaagtcaatgcggctaaaacagcattaaatggtgataacaacttacgtgtagcgaaagagcatgccaacaatacaattgacggcttagcacaattgaataatgcacaaaaagcaaaattaaaagaacaagttcaaagtgcaactacattagatggtgttcaaactgttaaaaatagttctcaaacgttgaatacagcgatgaaaggcttaagagatagtattgcgaatgaagcaacaattaaagcaggtcaaaactacactgacgcaagtccaaataatcgtaacgagtacgacagtgcagttactgcagcaaaagcaatcattaatcaaacatcgaacccaacgatggaaccaaatactattacgcaagtaacatcacaagtgacaactaaagaacaggcattaaatggtgcgcgaaacttagctcaagctaagacaactgcgaaaaacaacttgaataacttaacatcaattaacaatgcacaaaaagatgcgttaacgcgtagcattgatggtgcaacaacagtagctggtgtaaatcaagaaactgcaaaagcaacagaattaaataacgcaatgcatagtttacaaaatggtatcaatgatgagacacaaacaaaacaaactcagaaatacctagatgcagagccaagtaagaaatcagcttatgatcaagcagtaaatgcagcgaaagcaattttaacaaaagctagtggtcaaaatgtagacaaagcagcagttgaacaagcattgcaaaatgtgaacagtacgaagacggcgttgaacggtgatgcgaaattaaatgaagctaaagcagctgcgaaacaaacgttaggtacattaacacacattaataatgcacaacgtacagcgttagacaatgaaattacacaagcaacaaatgttgaaggtgttaatacagttaaagccaaagcgcaacaattagatggtgctatgggtcaattagaaacatcaattcgtgataaagacacgacgttacaaagtcaaaattatcaagatgctgatgatgctaaacgaactgcttattctcaagcagtaaatgcagcagcaactattttaaataaaacagctggcggtaatacacctaaagcagatgttgaaagagcaatgcaagctgttacacaagcaaatactgcattaaacggtattcaaaacttagatcgtgcgaaacaggctgctaacacagcgattacaaatgcttcggacttaaatacaaaacaaaaagaagcattaaaagcacaagtaacaagtgcaggacgtgtatctgcagcaaatggtgttgaacatactgcgactgaattaaatactgcgatgacagctttaaagcgtgccattgctgataaagctgagacaaaagctagtggtaactatgtcaatgctgatgcgaataaacgtcaagcatatgatgaaaaagttacagctgccgaaaatatcgttagtggtacaccaacaccaacgttaacaccagcagatgttacaaatgcagcaacgcaagtaacgaatgctaagacgcagttaaacggtaatcataatttagaagtagcgaaacaaaatgctaacactgcaattgatggtttaacttctttaaatggtccgcaaaaagcaaaacttaaagaacaagtgggtcaagcgacgacgttgccaaatgttcaaactgttcgtgataatgcacaaacattaaacactgcaatgaaaggtctacgagatagcattgcgaatgaagcaacgattaaagcaggtcaaaactacacagatgcaagtcaaaacaaacaaactgactacaacagtgcagtcactgcagcaaaagcaatcattggtcaaacaactagtccatcaatgaatgcgcaagaaattaatcaagcgaaagaccaagtgacagctaaacaacaagcgttaaacggtcaagaaaacttaagaactgcgcaaacaaatgcgaagcaacatttgaacggcttaagtgacttaactgacgctcaaaaagatgcagtgaaacgtcaaatcgaaggtgcaacgcatgttaatgaagtaacacaagcacaaaataatgcggatgcattaaatacagctatgacgaacttgaaaaatggtattcaagatcagaatacgattaagcaaggtgttaacttcactgatgccgacgaagcgaaacgtaatgcatatacaaatgcagtgacgcaagctgaacaaattttaaataaagcacaaggtccaaatacttcaaaagacggtgtcgaaactgcgttagaaaatgtacaacgtgctaaaaacgaattgaacggtaatcaaaatgttgcgaacgctaagacaactgcgaaaaatgcattgaataacctaacatcaattaataatgcacaaaaagaagcattgaaatcacaaattgaaggtgcgacaacagttgcaggtgtaaatcaagtgtctacaacggcatctgaattaaatacagcaatgagcaacttacaaaatggtattaatgatgaagcagctacaaaagcagctcagaaatatactgatgcagatagagaaaaacaaactgcatacaatgacgctgtaacagcagctaaaacgttattagataaaacagctggttcaaatgacaataaagcagctgttgaacaagcattacaacgtgtgaatactgctaaaacagcattaaatggtgacgagcgattaaatgaagcgaagaacacagctaaacaacaagtagcgacaatgtcacacttaactgatgctcaaaaagcaaacttaacatcgcaaatcgaaagtggtacgactgttgcaggtgttcaaggtattcaagctaatgccggtactttagatcaagcaatgaatcaattaagacaaagtattgcttctaaagatgcgactaaatcaagcgaagattatcaagacgcgaatgcagatttacaaaatgcatacaatgatgcggtaactaatgctgaaggtattattagtgcaacgaataaccctgaaatgaatcctgatacaattaaccaaaaagcgagccaagtgaacagtgcgaantctgcattgaacggtgatgaaaaattagcagcagcaaaacaaactgcgaaatcagatatcagtcgtttgacagacttgaacaatgcacaacgaactgcggcaaatgctgaagtggatcaagcaccaaatcttgcagctgtcacagcggctaaaaacaaagcaacatcgttaaacacagcgatgggtaatttgaaacatgcacttgctgaaaaggataatacgaaacgtagtgtcaattacacagatgcggatcaaccaaaacaacaagcgtatgatactgcggttacacaagcagaagcaattactaatgctaatggcagcaacgcgaatgaaacacaagttcaagcagcactaaaccaattgaatcaagctaaaaatgacttgaatggtgataataaagttgctcaagcaaaagagtcagcgaaacgtgcattagcttcatatagtaacttgaataatgcgcaatcaactgcagcaactagtcaaattgacaatgcaacgacagtagcaggcgtaactgctgcacaaaatactgctaatgaattaaatacagcaatgggtcaacttcaaaatggtataaatgaccaaaacactgttaaacaacaagtgaactttacagatgctgaccaaggtaagaaagatgcttacacaaatgctgttacgaatgctcaaggtattttagataaagtacacggtcaaaatatgacgaaagcacaagttgaagctgcattaaatcaagtaacgactgctaagaatgctttaaacggtgacgcaaatgtaagacaagcaaaatcagatgcgaaagcaaacttaggtacattaacacacttaaataatgcacaaaaacaagatttaacatcacaaatcgaaggcgcaacaacagtcaacggtgtaaatggtgttaaaacgaaagcacaagacttagatggtgcaatgcaacgattacaatcagctatagcaaataaagatcaaactaaagcgagcgaaaattacatcgacgcagatccaactaagaaaacagcatttgataatgctatcacacaagctgaatcttacttaaataaagatcacggtgcgaataaagataagcaagctgttgaacaagcaattcaaagtgtaacgtctactgaaaatgctttgaacggtgacgcgaacttacaacgcgctaaaactgaagctatacaagctatcgataacttgacacatttgaatacaccacaaaaaacagcattaaaacaacaagtgaacgctgcgcaacgtgtatcaggtgtaactgatctgaaaaatagtgctacatcacttaataatgcgatggatcaattaaaacaagcaattgctgatcatgacacaattgtagctagtggtaattacactaacgcgagtcctgataagcaaggtgcttatactgatgcatataatgctgcgaaaaacattgtaaatggttcgcctaatgtgattacaaatgcagcagatgttacagcagcaacacaacgtgttaataatgctgaaacaggtttaaacggtgatacaaacttagcaactgcgaagcaacaagctaaagatgcattacgtcaaatgacacatttatctgatgcacaaaaacaaagtattactggtcaaattgatagcgcgacacaagtaactggcgttcaaagtgtgaaagacaacgcgacaaatcttgataatgcaatgaatcaacttcgaaatagtattgcgaataaagatgatgtaaaagcgagtcaaccatatgttgatgcagatagagataaacaaaatgcatacaatacagcagttacaaatgctgaaaatatcattaatgcaacgagtcagccgacacttgatccatctgcagtaacacaagcagctaatcaagtgagcactaacaaaactgcgcttaatggtgcacaaaacttagcgaataaaaagcaagaaacgactgctaacatcaaccaattaagtcatttaaataatgctcaaaagcaagatttaaatacgcaagtgacaaatgcaccaaatattagcacagtaaatcaagtgaaaactaaagctgaacaattagatcaagcaatggaacgtttaatcaacggaatccaagacaaagatcaagtgaaacaaagtgttaactttacagatgcagatccagaaaaacaaacagcatacaacaatgcggtaactgctgctgaaaatattattaatcaagcaaatggtacaaatgcgaaccaatcacaagttgaagcagcactttcaactgtaacaactacgaaacaagcgttgaatggtgatagaaaagtaacagatgctaaaaacaatgcaaaccaaacattatctacgttagataacttaaacaatgcacaaaaaggtgctgttactggaaacatcaatcaagcgcacactgtagctgaagtaacgcaagccattcaaaccgctcaggaactgaatacagcgatgggtaacttgaaaaatagcttgaatgataaagacactacacttggcagtcaaaactttgcagatgcagatccagagaagaaaaatgcatacaatgaagcggttcataatgctgaaaatattttaaataaatctacaggtacgaacgtgcctaaagatcaagttgaagcagctatgaatcaagtgaatgctacaaaagcagcgcttaatggtactcaaaaccttgaaaaagctaaacaacacgcaaatacagcaattgacggtttaagccatttaacaaatgcacaaaaagaggcattaaaacaattggtacaacaatcgactactgttgcagaagcacaaggtaatgagcaaaaagcaaacaatgttgatgcagcaatggacaaattacgtcaaagtattgcagataatgcgacaacaaaacaaaaccaaaattatactgatgcaagtcagaataaaaaggatgcgtacaataatgctgtcacaactgcacaaggtattattgatcaaactacaagtccaactttagatccgactgttatcaatcaagctgctggacaagtaagcacaactaaaaatgcattaaatggtaatgaaaacctagaggcagcgaaacaacaagcgtcacaatcattaggttcattagataacttaaataatgcgcaaaaacaaacagttactgatcaaattaatggcgcgcatactgttgatgaagcaaatcaaattaagcaaaatgcgcaaaacttaaatacagcgatgggtaacttgaaacaagcgatagctgacaaagatgctacgaaagcgacagttaacttcactgatgcagatcaagcaaaacaacaagcatataacactgctgttacaaatgctgaaaatatcatttcaaaagctaatggcggcaatgcaacacaagctgaagttgaacaagcaatcaaacaagttaatgctgcaaaacaagcattaaatggtaatgccaacgttcaacatgcaaaagacgaagcaacagcattaattaatagctctaatgaccttaaccaagcacaaaaagacgcattaaaacaacaagttcaaaatgcaactactgtagctggtgtaaacaatgttaaacaaacagcacaagagttaaacaatgctatgacacaattaaaacaaggcattgcagataaagaacaaacaaaagctgatggtaactttgtcaatgcagatcctgataagcaaaatgcatataatcaagcagtagcgaaagctgaagcattaattagtgctacgcctgatgttgtcgttacacctagcgaaattactgcagcgttaaataaagttacgcaagctaaaaatgatttaaatggtaatacaaacttagcaacggcgaaacaaaatgttcaacatgctattgatcaattgccaaacttaaaccaagcgcaacgtgatgaatacagcaaacaaatcacgcaagcaacacttgtaccaaacgtcaatgctattcaacaagcggcgacaacgcttaatgacgcgatgacacaattgaaacaaggtattgcgaataaagcacaaattaaaggtagcgagaactatcacgatgctgatactgacaagcaaacagcatatgataatgcagtaacaaaagcagaagaattgttaaaacaaacaacaaatccaacaatggatccaaatacaattcaacaagcattaactaaagtgaatgacacaaatcaagcacttaacggtaatcaaaaattagctgatgccaaacaagatgctaagacaacacttggtacactagatcatttaaatgatgctcaaaaacaagcgctaacaactcaagttgaacaagcaccagatattgcaacagttaataatgttaagcaaaatgctcaaaatctgaataatgctatgactaacttaaacaatgcattacaagataaaactgagacattaaatagcattaactttactgatgcagatcaagctaagaaagatgcttatactaatgcggtttcacatgcagaaggtattttatctaaagcaaatggcagcaatgcaagtcaaactgaagtggaacaagcgatgcaacgtgtgaacgaagcgaaacaagcattgaatggtaatgacaatgtacaacgtgcaaaagatgcagcgaaacaagtgattacaaatgcaaatgatttaaatcaagcgcaaaaagatgcattaaaacaacaagtcgatgctgcgcaaactgttgcaaatgtaaacacgattaagcaaacagcacaagatttaaatcaagcaatgacacaattgaaacaaggtattgcagataaagaccaaactaaagcaaatggtaactttgtcaatgctgatactgataagcaaaatgcttacaacaatgcggtagcacatgctgaacaaataattagtggtacaccaaatgcaaacgtggatccacaacaagtggctcaagcgttacaacaagtgaatcaagctaagggtgatttaaacggtaaccataacttacaagttgctaaagacaatgcaaatacagccattgatcagttaccaaacttaaatcaaccacaaaaaacagcattaaaagaccaagtgtcgcatgcagaacttgttacaggtgttaatgctattaagcaaaatgctgatgcgttaaataatgcaatgggtacattgaaacaacaaattcaagcgaacagtcaagtaccacagtcagttgactttacacaagcggatcaagacaaacaacaagcatataacaatgcggctaaccaagcgcaacaaatcgcaaatggcataccaacacctgtattgacgcctgatacagtaacacaagcagtgacaactatgaatcaagcgaaagatgcattaaacggtgatgaaaaattagcacaagcgaaacaagaagctttagcaaatcttgatacgttacgcgatttaaatcaaccacaacgtgatgcattacgtaaccaaatcaatcaagcacaagcgttagctacagttgaacaaactaaacaaaatgcacaaaatgtgaatacagcaatgagtaacttgaaacaaggtattgcaaacaaagatactgtcaaagcaagtgagaactatcatgatgctgatgccgataagcaaacagcatatacaaatgcagtgtctcaagcggaaggtattatcaatcaaacgacaaatccaacgcttaacccagatgaaataacacgtgcattaactcaagtgactgatgctaaaaatggcttaaacggtgaagctaaattggcaactgaaaagcaaaatgctaaagatgccgtaagtgggatgacgcatttaaacgatgctcaaaaacaagcattaaaaggtcaaatcgatcaatcgcctgaaattgctacagtgaaccaagttaaacaaacagcaacgagcctagatcaagcaatggatcaattatcacaagctattaatgataaagctcaaacattagcggacggtaattacttaaatgcagatcctgacaaacaaaatgcgtataaacaggcagtagcaaaagctgaagcattattgaataaacaaagtggtactaatgaagtacaagcacaagttgaaagcatcactaatgaagtgaacgcagcgaaacaagcattaaatggtaatgacaatttggcaaatgcaaaacaacaagcaaaacaacaattggcgaacttaacacacttaaatgatgcacaaaaacaatcatttgaaagtcaaattacacaagcgccacttgttacagatgtcactacgattaatcaaaaagcacaaacgttagatcatgcgatggaattattaagaaatagtgttgcggataatcaaacgacattagcgtctgaagattatcatgatgcaactgcgcaaagacaaaatgactataaccaagctgtaacagctgctaataatatcattaatcaaactacatcgcctacgatgaatccagatgatgttaatggtgcaacgacacaagtgaataatacgaaagttgcattagatggtgatgaaaaccttgcagcagctaaacaacaagcaaacaacagacttgatcaattagatcatttgaataatgcgcaaaagcaacagttacaatcacaaattacgcaatcatctgatattgctgcagttaatggtcacaaacaaacagcagaatctttaaatactgcgatgggtaacttaattaatgcgattgcagatcatcaagccgttgaacaacgtggtaacttcatcaatgctgatactgataaacaaactgcttataatacagcggtaaatgaagcagcagcaatgattaacaaacaaactggtcaaaatgcgaaccaaacagaagtagaacaagctattactaaagttcaaacaacacttcaagcgttaaatggagaccataatttacaagttgctaaaacaaatgcgacgcaagcaattgatgctttaacaagcttaaatgatcctcaaaaaacagcattaaaagaccaagttacagctgcaactttagtaactgcagttcatcaaattgaacaaaatgcgaatacgcttaaccaagcaatgcatggtttaagacagagcattcaagataacgcagcaactaaagcaaatagcaaatatatcaacgaagatcaaccagagcaacaaaactatgatcaagctgttcaagccgcaaataatattatcaatgaacaaactgcaacattagataataatgcgattaatcaagcagcgacaactgtgaatacaacgaaagcagcattacatggtgatgtgaagttacaaaatgataaagatcatgctaagcaaacggttagtcaattagcacatctaaacaatgcacaaaaacatatggaagatacgttaattgatagtgaaacaactagaacagcagttaagcaagatttgactgaagcacaagcattagatcaacttatggatgcattacaacaaagtattgctgacaaagatgcaacacgtgcgagcagtgcatatgtcaatgcagaaccgaataaaaaacaatcctatgatgaagcagttcaaaatgctgagtctatcattgcaggattaaataatccaactatcaataaaggtaatgtatcaagtgcgactcaagcagtaatatcatctaaaaatgcattagatggtgttgaacgattagctcaagataagcaaactgctggaaattctctaaatcatttagatcaattaacaccagctcaacaacaagcgctagaaaatcaaattaataatgcaacaactcgtggcgaagtagcacaaaaattaactgaagcacaagcacttaaccaagcaatggaagctttacgtaatagcattcaagatcaacagcaaacggaagcgggtagcaagtttatcaatgaagataaaccacaaaaagatgcttaccaagcagcagttcaaaatgcaaaagatttaattaatcaaactaacaatccaacgcttgataaagcacaagttgaacaattgacacaagctgttaaccaagctaaagataacctacacggtgatcaaaaacttgcagacgataaacaacatgcggttactgatttaaatcaattaaatggtttgaataatccgcaacgtcaagcacttgaaagccaaataaacaacgcagcaactcgtggcgaagtagcacaaaaattagctgaagcaaaagcgcttgatcaagcaatgtaa

SEQ ID NO: 7558 - protein, 8824 aa, Staphylococcus aureus
  misc_feature (6119)..(6119): Xaa can be any naturally occurring amino acid
MNYRDKIQKFSIRKYTVGTFSTVIATLVFLGFNTSQAHAAETNQPASVVKQKQQSNNEQTENRESQVQNSQNSQNGQSLSATHENEQPNISQANLVDQKVAQSSTTNDEQPASQNVNTKKDSATAATTQPDKEQSKHKQNESQSANKNGNDNRAAHVENHEANVVTASDSSDNGNVQHDRNELQAFFDANYHDYRFIDRENADSGTFNYVKGIFDKINTLLGSNDPINNKDLQLAYKELEQAVALIRTMPQRQQTSRRSNRIQTRSVESRAAEPRSVSDYQNANSSYYVENANDGSGYPVGTYINASSKGAPYNLPTTPWNTLKASDSKEIALMTAKQTGDGYQWVIKFNKGHAPHQNMIFWFALPADQVPVGRTDFVTVNSDGTNVQWSHGAGAGANKPLQQMWEYGVNDPHRSHDFKIRNRSGQVIYDWPTVHIYSLEDLSRASDYFSEAGATPATKAFGRQNFEYINGQKPAESPGVPKVYTFIGQGDASYTISFKTQGPTVNKLYYAAGGRALEYNQLFMYSQLYVESTQDHQQRLNGLRQVVNRTYRIGTTKRVEVSQGNVQTKKVLESTNLNIDDFVDDPLSYVKTPSNKVLGFYSNNANTNAFRPGGAQQLNEYQLSQLFTDQKLQEAARTRNPIRLMIGFDYPDAYGNSETLVPVNLTVLPEIQHNIKFFKNDDTQNIAEKPFSKQAGHPVFYVYAGNQGNASVNLGGSVTSIQPLRINLTSNENFTDKDWQITGIPRTLHIENSTNRPNNARERNIELVGNLLPGDYFGTIRFGRKEQLFEIRVKPHTPTITTTAEQLRGTALQKVPVNISGIPLDPSALVYLVAPTNQTTNGGSEADQIPSGYTILATGTPDGVHNTITIRPQDYVVFIPPVGKQIRAVVYYNKVVASNMSNAVTILPDDIPPTINNPVGINAKYYRGDEVNFTMGVSDRHSGIKNTTITTLPNGWTSNLTKADKNNGSLSITGRVSMNQAFNSDITFKVSATDNVNNTTNDSQSKHVSIHVGKISEDAHPIVLGNTEKVVVVNPTAVSNDEKQSIITAFMNKNQNIRGYLASTDPVTVDNNGNVTLHYRDGSSTTLDATNVMTYEPVVKPEYQTVNAAKTATVTIAKGQSFSIGDIKQYFTLSNGQPIPSGTFTNITSDRTIPTAQEVSQMNAGTQLYHITATNAYHKDSEDFYISLKIIDVKQPEGDQRVYRTSTYDLTTDEISKVKQAFINANRDVITLAEGDISVTNTPNGANVSTITVNINKGRLTKSFASNLANMNFLRWVNFPQDYTVTWTNAKIANRPTDGGLSWSDDHKSLIYRYDATLGTQITTNDILTMLKATTTVPGLRNNITGNEKSQAEAGGRPNFRTTGYSQSNATTDGQRQFTLNGQVIQVLDIINPSNGYGGQPVTNSNTRANHSNSTVVNVNEPAANGAGAFTIDHVVKSNSTHNASDAVYKAQLYLTPYGPKQYVEHLNQNTGNTTDAINIYFVPSDLVNPTISVGNYTNHQVFSGETFTNTITANDNFGVQSVTVPNTSQITGTVDNNHQHVSATAPNVTSATNKTINLLATDTSGNTATTSFNVTVKPLRDKYRVGTSSTAANPVRIANISNNATVSQADQTTIINSLTFTETVPNRSYARASANEITSKTVSNVSRTGNNANVTVTVTYQDGTTSTVTVPVKHVIPEIVAHSHYTVQGQDFPAGNGSSASDYFKLSNGSDIADATITWVSGQAPNKDNTRIGEDITVTAHILIDGETTPITKTATYKVVRTVPKHVFETARGVLYPGVSDMYDAKQYVKPVNNSWSTNAQHMNFQFVGTYGPNKDVVGISTRLIRVTYDNRQTEDLTILSKVKPDPPRIDANSVTYKAGLTNQEIKVNNVLNNSSVKLFKADNTPLNVTNITHGSGFSSVVTVSDALPNGGIKAKSSISMNNVTYTTQDEHGQVVTVTRNESVDSNDSATVTVTPQLQATTEGAVFIKGGDGFDFGHVERFIQNPPHGATVAWHDSPDTWKNTVGNTHKTAVVTLPNGQGTRNVEVPVKVYPVANAKAPSRDVKGQNLTNGTDAMNYITFDPNTNTNGITAAWANRQQPNNQQAGVQHLNVDVTYPGISAAKRVPVTVNVYQFEFPQTTYTTTVGGTLASGTQASGYAHMQNATGLPTDGFTYKWNRDTTGTNDANWSAMNKPNVAKVVNAKYDVIYNGHTFATSLPAKFVVKDVQPAKPTVTETAAGAITIAPGANQTVNTHAGNVTTYADKLVIKRNGNVVTTFTRRNNTSPWVKEASAATVAGIAGTNNGITVAAGTFNPADTIQVVATQGSGETVSDEQRSDDFTVVAPQPNQATTKIWQNGHIDITPNNPSGHLINPTQAMDIAYTEKVGNGAEHSKTINVVRGQNNQWTIANKPDYVTLDAQTGKVTFNANTIKPNSSITITPKAGTGHSVSSNPSTLTAPAAHTVNTTEIVKDYGSNVTAAEINNAVQVANKRTATIKNGTAMPTNLAGGSTTTIPVTVTYNDGSTEEVQESIFTKADKRELITAKNHLDDPVSTEGKKPGTITQYNNAMHNAQQQINTAKTEAQQVINNERATPQQVSDALTKVRAAQTKIDQAKALLQNKEDNSQLVTSKNNLQSSVNQVPSTAGMTQQSIDNYNAKKREAETEITAAQRVIDNGDATAQQISDEKHRVDNALTALNQAKHDLTADTHALEQAVQQLNRTGTTTGKKPASITAYNNSIRALQSDLTSAKNSANAIIQKPIRTVQEVQSALTNVNRVNERLTQAINQLVPLADNSALKTAKTKLDEEINKSVTTDGMTQSSIQAYENAKRAGQTESTNAQNVINNGDATDQQIAAEKTKVEEKYNSLKQAIAGLTPDLAPLQTAKTQLQNDIDQPTSTTGMTSASIAAFNEKLSAARTKIQEIDRVLASHPDVATIRQNVTAANAAKSALDQARNGLTVDKAPLENAKNQLQHSIDTQTSTTGMTQDSINAYNAKLTAARNKIQQINQVLAGSPTVEQINTNTSTANQAKSDLDHARQALTPDKAPLQTAKTQLEQSINQPTDTTGMTTASLNAYNQKLQAARQKLTEINQVLNGNPTVQNINDKVTEANQAKDQLNTARQGLTLDRQPALTTLHGASNLNQAQQNNFTQQINAAQNHAALETIKSNITALNTAMTKLKDSVADNNTIKSDQNYTDATPANKQAYDNAVNAAKGVIGETTNPTMDVNTVNQKAASVKSTKDALDGQQNLQRAKTEATNAITHASDLNQAQKNALTQQVNSAQNVQAVNDIKQTTQSLNTAMTGLKRGVANHNQVVQSDNYVNADTNKKNDYNNAYNHANDIINGNAQHPVITPSDVNNALSNVTSKEHALNGEAKLNAAKQEANTALGHLNNLNNAQRQNLQSQINGAHQIDAVNTIKQNATNLNSAMGNLRQAVADKDQVKRTEDYADADTAKQNAYNSAVSSAETIINQTTNPTMSVDDVNRATSAVTSNKNALNGYEKLAQSKTDAARAIDALPHLNNAQKADVKSKINAASNIAGVNTVKQQGTDLNTAMGNLQGAINDEQTTLNSQNYQDATPSKKTAYTNAVQAAKDILNKSNGQNKTKDQVTEAMNQVNSAKNNLDGTRLLDQAKQTAKQQLNNMTHLTTAQKTNLTNQINSGTTVAGVQTVQSNANTLDQAMNTLRQSIANKDATKASEDYVDANNDKQTAYNNAVAAAETIINANSNPEMNPSTITQKAEQVNSSKRALNGDENLAAAKQNAKTYLNTLTSITDAQKNNLISQITSATRVSGVDTVKQNAQHLDQAMASLQNGINNESQVKSSEKYRDADTNKQQEYDNAITAAKAILNKSTGPNTAQNAVEAALQRVNNAKDALNGDAKLIAAQNAAKQHLGTLTHITTAQRNDLTNQISQATNLAGVESVKQNANSLDGAMGNLQTAINDKSGTLASQNFLDADEQKRNAYNQAVSAAETILNKQTGPNTAKTAVEQALNNVNNAKHALNGTQNLNNAKQAAITAINGASDLNQKQKDALKAQANGAQRVSNAQDVQHNATELNTAMGTLKHAIADKTNTLASSKYVNADSTKQNAYTTKVTNAEHIISGTPTVVTTPSEVTAAANQVNSAKQELNGDERLREAKQNANTAIDALTQLNTPQKAKLKEQVGQANRLEDVQTVQTNGQALNNAMKGLRDSIANETTVKTSQNYTDASPNNQSTYNSAVSNAKGIINQTNNPTMDTSAITQATTQVNNAKNGLNGAENLRNAQNTAKQNLNTLSHLTNNQKSAISSQIDRAGHVSEVTATKNAATELNTQMGNLEQAIHDQNTVKQSVKFTDADKAKRDAYTNAVSRAEAILNKTQGANTSKQDVEAAIQNVSSAKNALNGDQNVTNAKNAAKNALNNLTSINNAQKRDLTTKIDQATTVAGVEAVSNTSTQLNTAMANLQNGINDKTNTLASENYHDADSDKKTAYTQAVTNAENILNKNSGSNLDKTAVENALSQVANAKGALNGNHNLEQAKSNANTTINGLQHLTTAQKDKLKQQVQQAQNVAGVDTVKSSANTLNGAMGTLRNSIQDNTATKNGQNYLDATERNKTNYNNAVDSANGVINATSNPNMDANAINQIATQVTSTKNALDGTHNLTQAKQTATNAIDGATNLNKAQKDALKAQVTSAQRVANVTSIQQTANELNTAMGQLQHGIDDENATKQTQKYRDAEQSKKTAYDQAVAAAKAILNKQTGSNSDKAAVDRALQQVTSTKDALNGDAKLAEAKAAAKQNLGTLNHITNAQRTDLEGQINQATTVDGVNTVKTNANTLDGAMNSLQGSINDKDATLRNQNYLDADESKRNAYTQAVTAAEGILNKQTGGNTSKADVDNALNAVTRAKAALNGADNLRNAKTSATNTIDGLPNLTQLQKDNLKHQVEQAQNVAGVNGVKDKGNTLNTAMGALRTSIQNDNTTKTSQNYLDASDSNKNNYNTAVNNANGVINATNNPNMDANAINGMANQVNTTKAALNGAQNLAQAKTNATNTINNAHDLNQKQKDALKTQVNNAQRVSDANNVQHTATELNSAMTALKAAIADKERTKASGNYVNADQEKRQAYDSKVTNAENIISGTPNATLTVNDVNSAASQVNAAKTALNGDNNLRVAKEHANNTIDGLAQLNNAQKAKLKEQVQSATTLDGVQTVKNSSQTLNTAMKGLRDSIANEATIKAGQNYTDASPNNRNEYDSAVTAAKAIINQTSNPTMEPNTITQVTSQVTTKEQALNGARNLAQAKTTAKNNLNNLTSINNAQKDALTRSIDGATTVAGVNQETAKATELNNAMHSLQNGINDETQTKQTQKYLDAEPSKKSAYDQAVNAAKAILTKASGQNVDKAAVEQALQNVNSTKTALNGDAKLNEAKAAAKQTLGTLTHINNAQRTALDNEITQATNVEGVNTVKAKAQQLDGAMGQLETSIRDKDTTLQSQNYQDADDAKRTAYSQAVNAAATILNKTAGGNTPKADVERAMQAVTQANTALNGIQNLDRAKQAANTAITNASDLNTKQKEALKAQVTSAGRVSAANGVEHTATELNTAMTALKRAIADKAETKASGNYVNADANKRQAYDEKVTAAENIVSGTPTPTLTPADVTNAATQVTNAKTQLNGNHNLEVAKQNANTAIDGLTSLNGPQKAKLKEQVGQATTLPNVQTVRDNAQTLNTAMKGLRDSIANEATIKAGQNYTDASQNKQTDYNSAVTAAKAIIGQTTSPSMNAQEINQAKDQVTAKQQALNGQENLRTAQTNAKQHLNGLSDLTDAQKDAVKRQIEGATHVNEVTQAQNNADALNTAMTNLKNGIQDQNTIKQGVNFTDADEAKRNAYTNAVTQAEQILNKAQGPNTSKDGVETALENVQRAKNELNGNQNVANAKTTAKNALNNLTSINNAQKEALKSQIEGATTVAGVNQVSTTASELNTAMSNLQNGINDEAATKAAQKYTDADREKQTAYNDAVTAAKTLLDKTAGSNDNKAAVEQALQRVNTAKTALNGDERLNEAKNTAKQQVATMSHLTDAQKANLTSQIESGTTVAGVQGIQANAGTLDQAMNQLRQSIASKDATKSSEDYQDANADLQNAYNDAVTNAEGIISATNNPEMNPDTINQKASQVNSAXSALNGDEKLAAAKQTAKSDISRLTDLNNAQRTAANAEVDQAPNLAAVTAAKNKATSLNTAMGNLKHALAEKDNTKRSVNYTDADQPKQQAYDTAVTQAEAITNANGSNANETQVQAALNQLNQAKNDLNGDNKVAQAKESAKRALASYSNLNNAQSTAATSQIDNATTVAGVTAAQNTANELNTAMGQLQNGINDQNTVKQQVNFTDADQGKKDAYTNAVTNAQGILDKVHGQNMTKAQVEAALNQVTTAKNALNGDANVRQAKSDAKANLGTLTHLNNAQKQDLTSQIEGATTVNGVNGVKTKAQDLDGAMQRLQSAIANKDQTKASENYIDADPTKKTAFDNAITQAESYLNKDHGANKDKQAVEQAIQSVTSTENALNGDANLQRAKTEAIQAIDNLTHLNTPQKTALKQQVNAAQRVSGVTDLKNSATSLNNAMDQLKQAIADHDTIVASGNYTNASPDKQGAYTDAYNAAKNIVNGSPNVITNAADVTAATQRVNNAETGLNGDTNLATAKQQAKDALRQMTHLSDAQKQSITGQIDSATQVTGVQSVKDNATNLDNAMNQLRNSIANKDDVKASQPYVDADRDKQNAYNTAVTNAENIINATSQPTLDPSAVTQAANQVSTNKTALNGAQNLANKKQETTANINQLSHLNNAQKQDLNTQVTNAPNISTVNQVKTKAEQLDQAMERLINGIQDKDQVKQSVNFTDADPEKQTAYNNAVTAAENIINQANGTNANQSQVEAALSTVTTTKQALNGDRKVTDAKNNANQTLSTLDNLNNAQKGAVTGNINQAHTVAEVTQAIQTAQELNTAMGNLKNSLNDKDTTLGSQNFADADPEKKNAYNEAVHNAENILNKSTGTNVPKDQVEAAMNQVNATKAALNGTQNLEKAKQHANTAIDGLSHLTNAQKEALKQLVQQSTTVAEAQGNEQKANNVDAAMDKLRQSIADNATTKQNQNYTDASQNKKDAYNNAVTTAQGIIDQTTSPTLDPTVINQAAGQVSTTKNALNGNENLEAAKQQASQSLGSLDNLNNAQKQTVTDQINGAHTVDEANQIKQNAQNLNTAMGNLKQAIADKDATKATVNFTDADQAKQQAYNTAVTNAENIISKANGGNATQAEVEQAIKQVNAAKQALNGNANVQHAKDEATALINSSNDLNQAQKDALKQQVQNATTVAGVNNVKQTAQELNNAMTQLKQGIADKEQTKADGNFVNADPDKQNAYNQAVAKAEALISATPDVVVTPSEITAALNKVTQAKNDLNGNTNLATAKQNVQHAIDQLPNLNQAQRDEYSKQITQATLVPNVNAIQQAATTLNDAMTQLKQGIANKAQIKGSENYHDADTDKQTAYDNAVTKAEELLKQTTNPTMDPNTIQQALTKVNDTNQALNGNQKLADAKQDAKTTLGTLDHLNDAQKQALTTQVEQAPDIATVNNVKQNAQNLNNAMTNLNNALQDKTETLNSINFTDADQAKKDAYTNAVSHAEGILSKANGSNASQTEVEQAMQRVNEAKQALNGNDNVQRAKDAAKQVITNANDLNQAQKDALKQQVDAAQTVANVNTIKQTAQDLNQAMTQLKQGIADKDQTKANGNFVNADTDKQNAYNNAVAHAEQIISGTPNANVDPQQVAQALQQVNQAKGDLNGNHNLQVAKDNANTAIDQLPNLNQPQKTALKDQVSHAELVTGVNAIKQNADALNNAMGTLKQQIQANSQVPQSVDFTQADQDKQQAYNNAANQAQQIANGIPTPVLTPDTVTQAVTTMNQAKDALNGDEKLAQAKQEALANLDTLRDLNQPQRDALRNQINQAQALATVEQTKQNAQNVNTAMSNLKQGIANKDTVKASENYHDADADKQTAYTNAVSQAEGIINQTTNPTLNPDEITRALTQVTDAKNGLNGEAKLATEKQNAKDAVSGMTHLNDAQKQALKGQIDQSPEIATVNQVKQTATSLDQAMDQLSQAINDKAQTLADGNYLNADPDKQNAYKQAVAKAEALLNKQSGTNEVQAQVESITNEVNAAKQALNGNDNLANAKQQAKQQLANLTHLNDAQKQSFESQITQAPLVTDVTTINQKAQTLDHAMELLRNSVADNQTTLASEDYHDATAQRQNDYNQAVTAANNIINQTTSPTMNPDDVNGATTQVNNTKVALDGDENLAAAKQQANNRLDQLDHLNNAQKQQLQSQITQSSDIAAVNGHKQTAESLNTAMGNLINAIADHQAVEQRGNFINADTDKQTAYNTAVNEAAAMINKQTGQNANQTEVEQAITKVQTTLQALNGDHNLQVAKTNATQAIDALTSLNDPQKTALKDQVTAATLVTAVHQIEQNANTLNQAMHGLRQSIQDNAATKANSKYINEDQPEQQNYDQAVQAANNIINEQTATLDNNAINQAATTVNTTKAALHGDVKLQNDKDHAKQTVSQLAHLNNAQKHMEDTLIDSETTRTAVKQDLTEAQALDQLMDALQQSIADKDATRASSAYVNAEPNKKQSYDEAVQNAESIIAGLNNPTINKGNVSSATQAVISSKNALDGVERLAQDKQTAGNSLNHLDQLTPAQQQALENQINNATTRGEVAQKLTEAQALNQAMEALRNSIQDQQQTEAGSKFINEDKPQKDAYQAAVQNAKDLINQTNNPTLDKAQVEQLTQAVNQAKDNLHGDQKLADDKQHAVTDLNQLNGLNNPQRQALESQINNAATRGEVAQKLAEAKALDQAM

SEQ ID NO: 7559 - DNA, 26475 bp, Staphylococcus aureus
  misc_feature (7777)..(7777): n is a, c, g or t
gtgaattatcgtgataaaattcaaaagtttagtattcgtaaatatacagttggtacattttcaactgtcattgcgacattggtatttttaggattcaatacatcacaagcacatgctgctgaaacaaatcaaccagcaagcgtggttaaacagaaacaacaaagtaataatgaacagactgagaatcgagaatctcaagtacaaaattctcaaaattcacaaaatggtcaatcattatctgctactcatgaaaatgagcaaccaaatattagtcaagctaatttagtagatcaaaaagtagcgcaatcatctactactaatgatgaacaaccagcatctcaaaatgtaaatacaaagaaagattcggcaacggctgcgacaacacaaccagataaagaacaaagtaagcataaacaaaacgaaagtcaatctgctaataaaaatggaaacgacaatagagcggctcatgtagaaaatcatgaagcaaatgtagtaacagcttcagattcatctgataatggtaacgtacaacatgaccgaaatgaattacaagcgttttttgatgcaaattatcatgattatcgctttattgaccgtgaaaatgcagattctggcacatttaactatgtaaaaggcatttttgataagattaatacgttattaggcagtaatgatccaataaacaataaagacttgcaacttgcatacaaagaattggaacaagctgttgctttaattcgtacaatgcctcaacgtcaacagactagccgacgttcaaatagaattcaaacgcgttcggttgagtcaagagctgcagagcctagatcagtatcagactatcaaaatgcaaattcatcatattatgttgaaaatgctaatgatggttcgggctatcctgttggtacatatatcaatgcttctagtaaaggggcgccatataatttaccaactacaccatggaatacattgaaggcctctgactcaaaggaaattgctcttatgacagcgaaacaaactggagacgggtaccaatgggttattaagtttaataaaggacatgctccacatcaaaatatgatcttttggtttgcattaccagcagaccaagtgccagtaggaagaactgactttgtaacagttaattcagatggaacaaatgtacaatggagtcatggagcaggagcaggtgcaaataaaccacttcaacaaatgtgggaatatggagtaaatgatcctcatcgttcacatgactttaaaataagaaatagaagtggccaagtaatatatgactggccaactgtccatatttattctttagaagatttatctagagcgagtgattattttagtgaagctggagcgacacctgctactaaagcttttggtagacaaaattttgaatatattaatggtcaaaaacctgctgaatcaccgggtgttcctaaagtttatactttcatcggtcaaggtgatgcaagttatacaatttcatttaaaacacaaggtccaactgttaataaattgtactatgcagcaggtgggcgtgctttagagtacaatcaattatttatgtacagtcaactatacgtcgaatcaacgcaagaccatcaacaacgtcttaatggtttaagacaagtggttaatcgtacatatcgcataggtacaactaaacgtgtagaagtgagtcaaggaaatgtacaaacgaaaaaggtattagaaagtacaaacctaaatatagatgattttgttgatgatcctttaagttatgttaagacgccgagtaataaagtgttaggattttattcgaataatgcaaatactaatgcttttagaccgggtggagcccaacaattaaatgaatatcaattaagtcaattatttactgatcaaaaattacaagaagcagcaagaactagaaacccaataagattaatgattggtttcgactatcctgatgcttatggtaatagtgaaactttagttcctgttaacttaacggtattacctgaaatccaacataatattaaattctttaaaaatgacgatactcaaaatattgctgaaaaaccattttcaaaacaagctgggcatccagttttctatgtatatgcaggtaaccaagggaatgcttccgtgaatttaggtggtagcgtaacatctattcaaccattacgtattaatttaacaagtaatgagaattttacagataaagattggcaaattacaggtattccgcgtacattacacattgaaaactcgacaaatagacctaataatgccagagaacgcaatattgaacttgttggtaacttattaccaggggattactttggaacgatacgttttggacgtaaagaacaattattcgaaattcgtgttaaaccacatacaccaacaattacaacgacagctgagcaattaagaggtacagcattacaaaaagtgcctgttaatatttcgggaataccgttggatccatcggcattggtttatttagttgcaccaacaaatcaaactacgaatggtggtagtgaggcagatcaaataccatctggttatacgatacttgcgactggtacacctgatggggtgcataatacaattactatacgaccgcaagattatgttgtattcataccacctgtaggtaaacaaattagagcagtagtttattataataaagtagttgcatctaatatgagtaatgctgttactattttgccagatgacattccaccaacaatcaataatcctgttggaataaatgccaaatactatcgaggcgacgaagtcaactttacaatgggtgtctctgatagacattctggtataaaaaatacaactattacgacattgccgaatggttggacatcaaatttaacaaaagcggataagaataatggctcattatctattacaggtagagtgagtatgaatcaggcatttaacagtgatattacatttaaagtgtcagcgacagacaatgtcaataatacgacaaatgatagtcaatctaaacatgtttcaattcatgtaggtaaaattagtgaagatgctcatccgattgtattaggaaatactgagaaagttgtagtagtcaatccgactgctgtatctaatgatgaaaagcaaagcataattactgcctttatgaataaaaaccaaaatataagaggatatttagcatcaactgatccagtaactgtcgataataatggtaatgtcacattacattaccgtgatggctcatcgacaacgcttgatgctacaaatgtgatgacatacgaaccagttgtgaaacctgaataccaaactgtcaatgctgctaaaacagcaacggtaacgattgctaaaggacaatcatttagtattggtgatattaaacaatattttactttaagtaatggacaacctattccaagtggcacatttacaaatattacatctgatagaactattccaactgcacaagaagttagtcaaatgaacgcaggcacgcagttataccatataactgctacaaatgcgtatcataaagatagtgaagacttctatattagtttgaaaatcatcgatgtgaaacaaccagaaggcgatcaacgtgtatatcgtacatcaacatatgatttaactactgatgaaatctcaaaagtaaaacaagcatttattaatgcaaatagagatgtaattacgcttgccgaaggtgatatttcagttacaaatacacctaatggtgctaatgtaagtactattacagtaaatattaataaaggtcgattaacgaaatcattcgcgtcaaacctagctaatatgaatttcttgcgttgggttaatttcccacaagattatacagtgacatggacgaatgcaaaaattgcaaacagaccaacagatggtggtttatcatggtctgatgaccataaatctttaatttatcgttatgatgctacattaggtactcaaattacgacgaatgatattttaacaatgttaaaagcaacaactacagtgcctggattgcgaaataacattactggtaatgaaaaatcacaagcagaagctggcggaagacctaactttagaacgactggttattcacaatcaaatgcgacaactgatggtcaacgtcaatttacgttgaatggtcaagtgattcaagtgttagacatcatcaacccttcaaacggttatggtgggcaacctgttacaaattcaaatactcgtgcaaaccatagtaactcaactgttgttaacgtaaacgaaccggcagctaatggtgctggcgcatttacaattgaccacgttgtaaaaagtaattctacacataatgcaagtgatgcagtttataaagcacagttatacttaacgccatatggtccaaaacaatatgttgaacatttaaatcaaaatacaggaaatactactgacgctattaacatttattttgtaccaagtgacttagtgaatccaacaatttcagtaggtaattacactaatcatcaagtgttctcaggtgaaacatttacaaatactattacagcgaatgataactttggtgtgcaatctgtaactgtaccaaatacatcacaaattacaggtactgttgataataaccatcaacatgtttctgcaacggcaccaaatgtgacatcagcaactaataagacaatcaatttattagcaactgatacaagcggcaatacagctacaacttcgttcaatgtaacagtgaaacctttgcgtgataaatatcgagttggtacttcatcaacggctgctaatcctgtgagaattgccaatatttcgaataatgcgacagtatcacaagctgatcaaacgacaattattaattcgttaacgtttactgaaacagtaccaaatagaagttatgcaagagcaagtgcgaatgaaatcactagtaaaacagttagtaatgtcagtcgtactggaaataatgccaatgtcacagtaactgttacttatcaagatggaacaacatcaacagtgactgtacctgtaaagcatgtcattccagaaatcgttgcacattcgcattacactgtacaaggccaagacttcccagcaggtaatggttctagtgcatcagattactttaagttatctaatggtagtgacattgcagatgcaactattacatgggtaagtggacaagcgccaaataaagataatacacgtattggtgaagatataactgtaactgcacatatcttaattgatggcgaaacaacgccgattacgaaaacagcaacatataaagtagtaagaactgtaccgaaacatgtctttgaaacagccagaggtgttttatacccaggtgtttcagatatgtatgatgcgaaacaatatgttaagccagtaaataattcttggtcgacaaatgcgcaacatatgaatttccaatttgttggaacatatggtcctaacaaagatgttgtaggcatatctactcgtcttattagagtgacatatgataatagacaaacagaagatttaactattttatctaaagttaaacctgacccacctagaattgacgcaaactctgtgacatataaagcaggtcttacaaaccaagaaattaaagttaataacgtattaaataactcgtcagtaaaattatttaaagcagataatacaccattaaatgtcacaaatattactcatggtagcggttttagttcggttgtgacagtaagtgacgcgttaccaaatggcggaattaaagcaaaatcttcaatttcaatgaacaatgtgacgtatacgacgcaagacgaacatggtcaagttgttacagtaacaagaaatgaatctgttgattcaaatgacagtgcaacagtaacagtgacaccacaattacaagcaactactgaaggcgctgtatttattaaaggtggcgacggttttgatttcggacacgtagaaagatttattcaaaacccgccacatggggcaacggttgcatggcatgatagtccagatacatggaagaatacagtcggtaacactcataaaactgcggttgtaacattacctaatggtcaaggtacgcgtaatgttgaagttccagtcaaagtttatccagttgctaatgcaaaggcgccatcacgtgatgtgaaaggtcaaaatttgactaatggaacggatgcgatgaactacattacatttgatccaaatacaaacacaaatggtatcactgcagcatgggcaaatagacaacaaccaaataaccaacaagcaggcgtgcaacatttaaatgtcgatgtcacatatccaggtatttcagctgctaaacgagttcctgttactgttaatgtatatcaatttgaattccctcaaactacttatacgacaacggttggaggcactttagcaagtggtacgcaagcatcaggatatgcacatatgcaaaatgctactggtttaccaacagatggatttacgtataaatggaatcgtgatactacaggtacaaatgacgcaaactggtcagctatgaataaaccgaatgtggctaaagtcgttaacgcaaaatatgacgtcatctataacggacatacttttgcaacatctttaccagcgaaatttgtagtaaaagatgtgcaaccagcgaaaccaactgtgactgaaacagcggcaggagcgattacaattgcacctggagcaaaccaaacagtgaatacacatgccggtaacgtaacgacatacgctgataaattagttattaaacgtaatggtaacgttgtgacgacatttacacgtcgcaataatacgagtccatgggtgaaagaagcatctgcagcaactgtagcaggtattgctggaactaataatggtattactgttgcagcaggtactttcaaccctgctgatacaattcaagttgttgcaacgcaaggaagcggagagacagtgagtgatgagcaacgtagtgatgatttcacagttgtcgcaccacaaccgaaccaagcgactactaagatttggcaaaatggtcatattgatatcacgcctaataatccatcaggacatttaattaatccaactcaagcaatggatattgcttacactgaaaaagtgggtaatggtgcagaacatagtaagacaattaatgttgttcgtggtcaaaataatcaatggacaattgcgaataagcctgactatgtaacgttagatgcacaaactggtaaagtgacgttcaatgccaatactataaaaccaaattcatcaatcacaattactccgaaagcaggtacaggtcactcagtaagtagtaatccaagtacattaactgcaccggcagctcatactgtcaacacaactgaaattgtgaaagattatggttcaaatgtaacagcagctgaaattaacaatgcagttcaagttgctaataaacgtactgcaacgattaaaaatggcacagcaatgcctactaatttagctggtggtagcacaacgacgattcctgtgacagtaacttacaatgatggtagtactgaagaagtacaagagtccattttcacaaaagcggataaacgtgagttaatcacagctaaaaatcatttagatgatccagtaagcactgaaggtaaaaagccaggtacaattacgcagtacaataatgcaatgcataatgcgcaacaacaaatcaatactgcgaaaacagaagcacaacaagtgattaataatgagcgtgcaacaccacaacaagtttctgacgcactaactaaagttcgtgcagcacaaactaagattgatnaagctaaagcattacttcaaaataaagaagataatagccaattagtaacgtctaaaaataacttacaaagttctgtgaaccaagtaccatcaactgctggtatgacgcaacaaagtattgataactataatgcgaagaagcgtgaagcagaaactgaaataactgcagctcaacgtgttattgacaatggcgatgcaactgcacaacaaatttcagatgaaaaacatcgtgtcgataacgcattaacagcattaaaccaagcgaaacatgatttaactgcagatacacatgccttagagcaagcagtgcaacaattgaatcgcacaggtacaacgactggtaagaagccggcaagtattactgcttacaataattcgattcgtgcacttcaaagtgacttaacaagtgctaaaaatagcgctaatgctattattcaaaagccaataagaacagtacaagaagtgcaatctgcgttaacaaatgtaaatcgtgtcaatgagcgattaacgcaagcaattaatcaattagtacctttagctgataatagtgctttaaaaactgctaagacgaaacttgatgaagaaatcaataaatcagtaacgactgatggtatgacacaatcatcaatccaagcatatgaaaatgctaaacgtgcgggtcaaacagaatcaacaaatgcacaaaatgttattaacaatggtgatgcgactgaccaacaaattgccgcagaaaaaacaaaagtagaagaaaaatataatagcttaaaacaagcaattgctggattaactccagacttggcaccattacaaactgcaaaaactcagttgcaaaatgatattgatcagccaacgagtacgactggtatgacaagcgcatctattgcagcatttaatgaaaaactttcagcagctagaactaaaattcaagaaattgatcgtgtattagcctcacatccagatgttgcgacaatacgtcaaaacgtgacagcagcgaatgccgctaaatcagcacttgatcaagcacgtaatggcttaacagtcgataaagcgcctttagaaaatgcgaaaaatcaactacaacatagtattgacacgcaaacaagtacaactggtatgacacaagactctataaatgcatataatgcgaagttaacagctgcacgtaataagattcaacaaatcaatcaagtattagcaggttcaccgactgtagaacaaattaatacaaatacgtctacagcaaatcaagctaaatctgatttagatcatgcacgtcaagctttaacaccagataaagcgccgcttcaaactgcgaaaacgcaattagaacaaagcattaatcaaccaacggatacaacaggtatgacgaccgcttcgttaaatgcgtacaaccaaaaattacaagcagcgcgtcaaaagttaactgaaattaatcaagtgttgaatggcaacccaactgtccaaaatatcaatgataaagtgacagaggcaaaccaagctaaggatcaattaaatacagcacgtcaaggtttaacattagatagacagccagcgttaacaacattacatggtgcatctaacttaaaccaagcacaacaaaataatttcacgcaacaaattaatgctgctcaaaatcatgctgcgcttgaaacaattaagtctaacattacggctttaaatactgcgatgacgaaattaaaagacagtgttgcggataataatacaattaaatcagatcaaaattacactgacgcaacaccagctaataaacaagcgtatgataatgcagttaatgcggctaaaggtgtcattggagaaacgactaatccaacgatggatgttaacacagtgaaccaaaaagcagcatctgttaaatcgacgaaagatgctttagatggtcaacaaaacttacaacgtgcgaaaacagaagcaacaaatgcgattacgcatgcaagtgatttaaaccaagcacaaaagaatgcattaacacaacaagtgaatagtgcacaaaacgtgcaagcagtaaatgatattaaacaaacgactcaaagcttaaatactgctatgacaggtttaaaacgtggcgttgctaatcataaccaagtcgtacaaagtgataattatgtcaacgcagatactaataagaaaaatgattacaacaatgcatacaaccatgcgaatgacattattaatggtaatgcacaacatccagttataacaccaagtgatgttaacaatgctttatcaaatgtcacaagtaaagaacatgcattgaatggtgaagctaagttaaatgctgcgaaacaagaagcgaatactgcattaggtcatttaaacaatttaaataatgcacaacgtcaaaacttacaatcgcaaattaatggtgcgcatcaaattgatgcagttaatacaattaagcaaaatgcaacaaacttgaatagtgcaatgggtaacttaagacaagctgttgcagataaagatcaagtgaaacgtacagaagattatgcggatgcagatacagctaaacaaaatgcatataacagtgcagtttcaagtgccgaaacaatcattaatcaaacaacaaatccaacgatgtctgttgatgatgttaatcgtgcaacttcagctgttacttctaataaaaatgcattaaatggttatgaaaaattagcacaatctaaaacagatgctgcaagagcaattgatgcattaccacatttaaataatgcacaaaaagcagatgttaaatctaaaattaatgctgcatcaaatattgctggcgtaaatactgttaaacaacaaggtacagatttaaatacagcgatgggtaacttgcaaggtgcaatcaatgatgaacaaacgacgcttaatagtcaaaactatcaagatgcgacacctagtaagaaaacagcatacacaaatgcggtacaagctgcgaaagatattttaaataaatcaaatggtcaaaataaaacgaaagatcaagttactgaagcgatgaatcaagtgaattctgctaaaaataacttagatggtacgcgtttattagatcaagcgaagcaaacagcaaaacagcagttaaataatatgacgcatttaacaactgcacaaaaaacgaatttaacaaaccaaattaatagtggtactactgtcgctggtgttcaaacggttcaatcaaatgccaatacattagatcaagccatgaatacgttaagacaaagtattgccaacaaagatgcgactaaagcaagtgaagattacgtagatgctaataatgataagcaaacagcatataacaacgcagtagctgctgctgaaacgattattaatgctaatagtaatccagaaatgaatccaagtacgattacacaaaaagcagagcaagtgaatagttctaaaagggcacttaacggtgatgaaaacttagctgctgcaaaacaaaatgcgaaaacgtacttaaacacattgacaagtattacagatgctcaaaagaacaatttgattagtcaaattactagtgcgacaagagtgagtggtgttgatactgtaaaacaaaatgcgcaacatctagaccaagctatggctagcttacagaatggtattaacaacgaatctcaagtgaaatcatctgagaaatatcgtgatgctgatacaaataaacaacaagagtatgataatgctattactgcagcgaaagcgattttaaataaatcgacaggtccaaacactgcgcaaaatgcagttgaagcagcattacaacgtgttaataatgcgaaagatgcattgaatggtgatgcaaaattaattgcagctcaaaacgcagcgaaacaacatttaggtactttaacgcatatcactacagctcaacgtaatgatttaacaaatcaaatttcacaagctacaaacttagctggtgttgaatctgttaaacaaaatgcgaatagtttagatggtgctatgggtaacttacaaacggctatcaacgataagtcaggaacattagcgagccaaaacttcttggatgctgatgagcaaaaacgtaatgcatacaatcaagctgtatcagcagccgaaaccattttaaataaacaaactggaccgaatacagcgaaaacagcagtcgaacaagcacttaataatgttaataatgcgaaacatgcattaaatggtacgcaaaacttaaacaatgcgaaacaagcagcgattacagcaatcaatggcgcatctgatttaaatcaaaaacaaaaagatgcattaaaagcacaagctaatggtgctcaacgcgtatctaatgcacaagatgtacagcacaatgcgactgaactgaacacggcaatgggcacattaaaacatgccatcgcagataagacgaatacgttagcaagcagtaaatatgttaatgccgatagcactaaacaaaatgcttacacaactaaagttaccaatgctgaacatattattagcggtacgccaacggttgttacgacaccttcagaagtaacagctgcagctaatcaagtaaacagcgcgaaacaagaattaaatggtgacgaaagattacgtgaagcaaaacaaaacgccaatactgctattgatgcattaacacaattaaatacacctcaaaaagctaaattaaaagaacaagtgggacaagccaatagattagaagacgtacaaactgttcaaacaaatggacaagcattgaacaatgcaatgaaaggcttaagagatagtattgctaacgaaacaacagtcaaaacaagtcaaaactatacagacgcaagtccgaataaccaatcaacatataatagcgctgtgtcaaatgcgaaaggtatcattaatcaaactaacaatccgactatggatactagtgcgattacccaagctacaacacaagtgaataatgctaaaaatggtttaaacggtgctgaaaacttaagaaatgcacaaaacactgctaagcaaaacttaaatacattatcacacttaacaaataaccaaaaatctgccatctcatcacaaattgatcgtgcaggtcatgtgagtgaggtaactgctactaaaaatgcagcaactgagttgaatacgcaaatgggtaacttggaacaagctatccatgatcaaaacacagttaaacaaagtgttaaatttactgatgcagataaagctaaacgtgatgcgtatacaaatgcggtaagcagagctgaagcaattctgaataaaacgcaaggtgcaaatacgtctaaacaagatgttgaagcggctattcaaaatgtttcaagtgctaaaaatgcattgaatggtgatcaaaacgttacaaatgcgaagaatgcagctaaaaatgcattaaataacttaacgtcaattaataatgcacaaaaacgtgacttaacaactaaaattgatcaagcaacaactgtagctggtgttgaagctgtatctaatacgagtacacaattgaatacagcgatggctaacttgcaaaatggtattaatgataaaacaaatacactagcaagtgaaaactatcatgatgctgattcagataagaaaactgcttatactcaagccgttacgaacgcagaaaatattttaaataaaaatagtggatcaaatttagacaaaactgccgttgaaaacgcgttgtcacaagttgctaatgcgaaaggtgccctaaatggtaaccataatttagagcaagctaaatcaaatgcaaacactactataaacggacttcaacatttaacaactgctcaaaaagataaattgaaacaacaagtgcaacaagcacaaaatgttgcaggtgtagatactgttaaatcaagtgccaacacattaaatggtgctatgggtacgttaagaaatagcatacaagataacacagctacgaaaaatggccaaaactatcttgatgctacagaacgtaacaaaacaaactataacaatgctgttgatagtgctaatggcgtcattaatgcaacaagcaatccaaatatggatgctaatgcaattaaccaaatcgctacacaagtgacatcaacgaaaaatgcattagatggtacacataatttaacgcaagcgaaacaaacagcaacaaatgccatcgatggtgctactaacttaaataaagcgcaaaaagatgcgttaaaagcacaagttacaagtgcgcaacgtgttgcaaatgtaacaagtatccaacaaactgcaaatgaacttaatacagctatgggtcaattacaacatggtattgatgatgaaaatgcaacaaaacaaactcaaaaatatcgtgacgctgaacaaagtaagaaaactgcttatgatcaagctgtagctgctgcgaaagcaattttaaataaacaaacaggttcaaattcagataaagcagcagttgaccgtgcattacaacaagtaacaagtacgaaagatgcattgaatggtgatgcaaaactggcagaagcgaaagcggcagctaaacaaaacttaggcactttaaaccatattacgaatgcacaacgtactgacttagaaggccaaatcaatcaagcgacgactgttgatggcgttaatactgtaaaaacaaatgccaatacattagacggcgcaatgaatagcttacaaggttcaatcaatgataaagatgcgacattaagaaatcaaaattatcttgatgcggatgaatcaaaacgaaatgcatatacgcaagctgtcacagcggctgaaggcattttaaataaacaaactggtggtaacacatctaaagcagacgttgataatgcattaaatgcagttacaagagcgaaagcggctttaaatggtgctgacaacttaagaaatgcgaaaacttcagcaacaaatacgattgatggtttacctaacttaacacaattacaaaaagacaacttgaagcatcaagttgaacaagcgcaaaatgtagcaggtgtaaatggtgttaaagataaaggtaatacgttaaatactgccatgggtgcattacgtacaagtatccaaaatgataatacgacgaaaacaagtcaaaattatcttgatgcatctgacagcaacaaaaataattacaatactgctgtaaataatgcaaatggtgttattaatgcaacgaacaatccaaatatggatgctaatgcgattaatggcatggcaaatcaagtcaatacaacaaaagcagcgttaaatggtgcacaaaacttagctcaagctaaaacaaatgcgacgaacacaattaacaacgcacatgacttaaaccaaaaacaaaaagatgcattaaaaacacaagttaacaatgcacaacgtgtatctgatgcaaataacgttcaacacactgcaactgaattgaacagtgcgatgacagcacttaaagcagctattgctgataaagaaagaacaaaagcaagcggtaattatgtcaatgctgatcaagaaaaacgtcaagcgtatgattcaaaagtgactaacgctgaaaatatcattagtggtacaccgaatgcgacattaacagtcaatgacgtaaatagtgcggcatcacaagtcaatgcggctaaaacagcattaaatggtgataacaacttacgtgtagcgaaagagcatgccaacaatacaattgacggcttagcacaattgaataatgcacaaaaagcaaaattaaaagaacaagttcaaagtgcaactacattagatggtgttcaaactgttaaaaatagttctcaaacgttgaatacagcgatgaaaggcttaagagatagtattgcgaatgaagcaacaattaaagcaggtcaaaactacactgacgcaagtccaaataatcgtaacgagtacgacagtgcagttactgcagcaaaagcaatcattaatcaaacatcgaacccaacgatggaaccaaatactattacgcaagtaacatcacaagtgacaactaaagaacaggcattaaatggtgcgcgaaacttagctcaagctaagacaactgcgaaaaacaacttgaataacttaacatcaattaacaatgcacaaaaagatgcgttaacgcgtagcattgatggtgcaacaacagtagctggtgtaaatcaagaaactgcaaaagcaacagaattaaataacgcaatgcatagtttacaaaatggtatcaatgatgagacacaaacaaaacaaactcagaaatacctagatgcagagccaagtaagaaatcagcttatgatcaagcagtaaatgcagcgaaagcaattttaacaaaagctagtggtcaaaatgtagacaaagcagcagttgaacaagcattgcaaaatgtgaacagtacgaagacggcgttgaacggtgatgcgaaattaaatgaagctaaagcagctgcgaaacaaacgttaggtacattaacacacattaataatgcacaacgtacagcgttagacaatgaaattacacaagcaacaaatgttgaaggtgttaatacagttaaagccaaagcgcaacaattagatggtgctatgggtcaattagaaacatcaattcgtgataaagacacgacgttacaaagtcaaaattatcaagatgctgatgatgctaaacgaactgcttattctcaagcagtaaatgcagcagcaactattttaaataaaacagctggcggtaatacacctaaagcagatgttgaaagagcaatgcaagctgttacacaagcaaatactgcattaaacggtattcaaaacttagatcgtgcgaaacaggctgctaacacagcgattacaaatgcttcggacttaaatacaaaacaaaaagaagcattaaaagcacaagtaacaagtgcaggacgtgtatctgcagcaaatggtgttgaacatactgcgactgaattaaatactgcgatgacagctttaaagcgtgccattgctgataaagctgagacaaaagctagtggtaactatgtcaatgctgatgcgaataaacgtcaagcatatgatgaaaaagttacagctgccgaaaatatcgttagtggtacaccaacaccaacgttaacaccagcagatgttacaaatgcagcaacgcaagtaacgaatgctaagacgcagttaaacggtaatcataatttagaagtagcgaaacaaaatgctaacactgcaattgatggtttaacttctttaaatggtccgcaaaaagcaaaacttaaagaacaagtgggtcaagcgacgacgttgccaaatgttcaaactgttcgtgataatgcacaaacattaaacactgcaatgaaaggtctacgagatagcattgcgaatgaagcaacgattaaagcaggtcaaaactacacagatgcaagtcaaaacaaacaaactgactacaacagtgcagtcactgcagcaaaagcaatcattggtcaaacaactagtccatcaatgaatgcgcaagaaattaatcaagcgaaagaccaagtgacagctaaacaacaagcgttaaacggtcaagaaaacttaagaactgcgcaaacaaatgcgaagcaacatttgaacggcttaagtgacttaactgacgctcaaaaagatgcagtgaaacgtcaaatcgaaggtgcaacgcatgttaatgaagtaacacaagcacaaaataatgcggatgcattaaatacagctatgacgaacttgaaaaatggtattcaagatcagaatacgattaagcaaggtgttaacttcactgatgccgacgaagcgaaacgtaatgcatatacaaatgcagtgacgcaagctgaacaaattttaaataaagcacaaggtccaaatacttcaaaagacggtgtcgaaactgcgttagaaaatgtacaacgtgctaaaaacgaattgaacggtaatcaaaatgttgcgaacgctaagacaactgcgaaaaatgcattgaataacctaacatcaattaataatgcacaaaaagaagcattgaaatcacaaattgaaggtgcgacaacagttgcaggtgtaaatcaagtgtctacaacggcatctgaattaaatacagcaatgagcaacttacaaaatggtattaatgatgaagcagctacaaaagcagctcagaaatatactgatgcagatagagaaaaacaaactgcatacaatgacgctgtaacagcagctaaaacgttattagataaaacagctggttcaaatgacaataaagcagctgttgaacaagcattacaacgtgtgaatactgctaaaacagcattaaatggtgacgagcgattaaatgaagcgaagaacacagctaaacaacaagtagcgacaatgtcacacttaactgatgctcaaaaagcaaacttaacatcgcaaatcgaaagtggtacgactgttgcaggtgttcaaggtattcaagctaatgccggtactttagatcaagcaatgaatcaattaagacaaagtattgcttctaaagatgcgactaaatcaagcgaagattatcaagacgcgaatgcagatttacaaaatgcatacaatgatgcggtaactaatgctgaaggtattattagtgcaacgaataaccctgaaatgaatcctgatacaattaaccaaaaagcgagccaagtgaacagtgcgaattctgcattgaacggtgatgaaaaattagcagcagcaaaacaaactgcgaaatcagatatcagtcgtttgacagacttgaacaatgcacaacgaactgcggcaaatgctgaagtggatcaagcaccaaatcttgcagctgtcacagcggctaaaaacaaagcaacatcgttaaacacagcgatgggtaatttgaaacatgcacttgctgaaaaggataatacgaaacgtagtgtcaattacacagatgcggatcaaccaaaacaacaagcgtatgatactgcggttacacaagcagaagcaattactaatgctaatggcagcaacgcgaatgaaacacaagttcaagcagcactaaaccaattgaatcaagctaaaaatgacttgaatggtgataataaagttgctcaagcaaaagagtcagcgaaacgtgcattagcttcatatagtaacttgaataatgcgcaatcaactgcagcaactagtcaaattgacaatgcaacgacagtagcaggcgtaactgctgcacaaaatactgctaatgaattaaatacagcaatgggtcaacttcaaaatggtataaatgaccaaaacactgttaaacaacaagtgaactttacagatgctgaccaaggtaagaaagatgcttacacaaatgctgttacgaatgctcaaggtattttagataaagtacacggtcaaaatatgacgaaagcacaagttgaagctgcattaaatcaagtaacgactgctaagaatgctttaaacggtgacgcaaatgtaagacaagcaaaatcagatgcgaaagcaaacttaggtacattaacacacttaaataatgcacaaaaacaagatttaacatcacaaatcgaaggcgcaacaacagtcaacggtgtaaatggtgttaaaacgaaagcacaagacttagatggtgcaatgcaacgattacaatcagctatagcaaataaagatcaaactaaagcgagcgaaaattacatcgacgcagatccaactaagaaaacagcatttgataatgctatcacacaagctgaatcttacttaaataaagatcacggtgcgaataaagataagcaagctgttgaacaagcaattcaaagtgtaacgtctactgaaaatgctttgaacggtgacgcgaacttacaacgcgctaaaactgaagctatacaagctatcgataacttgacacatttgaatacaccacaaaaaacagcattaaaacaacaagtgaacgctgcgcaacgtgtatcaggtgtaactgatctgaaaaatagtgctacatcacttaataatgcgatggatcaattaaaacaagcaattgctgatcatgacacaattgtagctagtggtaattacactaacgcgagtcctgataagcaaggtgcttatactgatgcatataatgctgcgaaaaacattgtaaatggttcgcctaatgtgattacaaatgcagcagatgttacagcagcaacacaacgtgttaataatgctgaaacaggtttaaacggtgatacaaacttagcaactgcgaagcaacaagctaaagatgcattacgtcaaatgacacatttatctgatgcacaaaaacaaagtattactggtcaaattgatagcgcgacacaagtaactggcgttcaaagtgtgaaagacaacgcgacaaatcttgataatgcaatgaatcaacttcgaaatagtattgcgaataaagatgatgtaaaagcgagtcaaccatatgttgatgcagatagagataaacaaaatgcatacaatacagcagttacaaatgctgaaaatatcattaatgcaacgagtcagccgacacttgatccatctgcagtaacacaagcagctaatcaagtgagcactaacaaaactgcgcttaatggtgcacaaaacttagcgaataaaaagcaagaaacgactgctaacatcaaccaattaagtcatttaaataatgctcaaaagcaagatttaaatacgcaagtgacaaatgcaccaaatattagcacagtaaatcaagtgaaaactaaagctgaacaattagatcaagcaatggaacgtttaatcaacggaatccaagacaaagatcaagtgaaacaaagtgttaactttacagatgcagatccagaaaaacaaacagcatacaacaatgcggtaactgctgctgaaaatattattaatcaagcaaatggtacaaatgcgaaccaatcacaagttgaagcagcactttcaactgtaacaactacgaaacaagcgttgaatggtgatagaaaagtaacagatgctaaaaacaatgcaaaccaaacattatctacgttagataacttaaacaatgcacaaaaaggtgctgttactggaaacatcaatcaagcgcacactgtagctgaagtaacgcaagccattcaaaccgctcaggaactgaatacagcgatgggtaacttgaaaaatagcttgaatgataaagacactacacttggcagtcaaaactttgcagatgcagatccagagaagaaaaatgcatacaatgaagcggttcataatgctgaaaatattttaaataaatctacaggtacgaacgtgcctaaagatcaagttgaagcagctatgaatcaagtgaatgctacaaaagcagcgcttaatggtactcaaaaccttgaaaaagctaaacaacacgcaaatacagcaattgacggtttaagccatttaacaaatgcacaaaaagaggcattaaaacaattggtacaacaatcgactactgttgcagaagcacaaggtaatgagcaaaaagcaaacaatgttgatgcagcaatggacaaattacgtcaaagtattgcagataatgcgacaacaaaacaaaaccaaaattatactgatgcaagtcagaataaaaaggatgcgtacaataatgctgtcacaactgcacaaggtattattgatcaaactacaagtccaactttagatccgactgttatcaatcaagctgctggacaagtaagcacaactaaaaatgcattaaatggtaatgaaaacctagaggcagcgaaacaacaagcgtcacaatcattaggttcattagataacttaaataatgcgcaaaaacaaacagttactgatcaaattaatggcgcgcatactgttgatgaagcaaatcaaattaagcaaaatgcgcaaaacttaaatacagcgatgggtaacttgaaacaagcgatagctgacaaagatgctacgaaagcgacagttaacttcactgatgcagatcaagcaaaacaacaagcatataacactgctgttacaaatgctgaaaatatcatttcaaaagctaatggcggcaatgcaacacaagctgaagttgaacaagcaatcaaacaagttaatgctgcaaaacaagcattaaatggtaatgccaacgttcaacatgcaaaagacgaagcaacagcattaattaatagctctaatgaccttaaccaagcacaaaaagacgcattaaaacaacaagttcaaaatgcaactactgtagctggtgtaaacaatgttaaacaaacagcacaagagttaaacaatgctatgacacaattaaaacaaggcattgcagataaagaacaaacaaaagctgatggtaactttgtcaatgcagatcctgataagcaaaatgcatataatcaagcagtagcgaaagctgaagcattaattagtgctacgcctgatgttgtcgttacacctagcgaaattactgcagcgttaaataaagttacgcaagctaaaaatgatttaaatggtaatacaaacttagcaacggcgaaacaaaatgttcaacatgctattgatcaattgccaaacttaaaccaagcgcaacgtgatgaatacagcaaacaaatcacgcaagcaacacttgtaccaaacgtcaatgctattcaacaagcggcgacaacgcttaatgacgcgatgacacaattgaaacaaggtattgcgaataaagcacaaattaaaggtagcgagaactatcacgatgctgatactgacaagcaaacagcatatgataatgcagtaacaaaagcagaagaattgttaaaacaaacaacaaatccaacaatggatccaaatacaattcaacaagcattaactaaagtgaatgacacaaatcaagcacttaacggtaatcaaaaattagctgatgccaaacaagatgctaagacaacacttggtacactagatcatttaaatgatgctcaaaaacaagcgctaacaactcaagttgaacaagcaccagatattgcaacagttaataatgttaagcaaaatgctcaaaatctgaataatgctatgactaacttaaacaatgcattacaagataaaactgagacattaaatagcattaactttactgatgcagatcaagctaagaaagatgcttatactaatgcggtttcacatgcagaaggtattttatctaaagcaaatggcagcaatgcaagtcaaactgaagtggaacaagcgatgcaacgtgtgaacgaagcgaaacaagcattgaatggtaatgacaatgtacaacgtgcaaaagatgcagcgaaacaagtgattacaaatgcaaatgatttaaatcaagcgcaaaaagatgcattaaaacaacaagtcgatgctgcgcaaactgttgcaaatgtaaacacgattaagcaaacagcacaagatttaaatcaagcaatgacacaattgaaacaaggtattgcagataaagaccaaactaaagcaaatggtaactttgtcaatgctgatactgataagcaaaatgcttacaacaatgcggtagcacatgctgaacaaataattagtggtacaccaaatgcaaacgtggatccacaacaagtggctcaagcgttacaacaagtgaatcaagctaagggtgatttaaacggtaaccataacttacaagttgctaaagacaatgcaaatacagccattgatcagttaccaaacttaaatcaaccacaaaaaacagcattaaaagaccaagtgtcgcatgcagaacttgttacaggtgttaatgctattaagcaaaatgctgatgcgttaaataatgcaatgggtacattgaaacaacaaattcaagcgaacagtcaagtaccacagtcagttgactttacacaagcggatcaagacaaacaacaagcatataacaatgcggctaaccaagcgcaacaaatcgcaaatggcataccaacacctgtattgacgcctgatacagtaacacaagcagtgacaactatgaatcaagcgaaagatgcattaaacggtgatgaaaaattagcacaagcgaaacaagaagctttagcaaatcttgatacgttacgcgatttaaatcaaccacaacgtgatgcattacgtaaccaaatcaatcaagcacaagcgttagctacagttgaacaaactaaacaaaatgcacaaaatgtgaatacagcaatgagtaacttgaaacaaggtattgcaaacaaagatactgtcaaagcaagtgagaactatcatgatgctgatgccgataagcaaacagcatatacaaatgcagtgtctcaagcggaaggtattatcaatcaaacgacaaatccaacgcttaacccagatgaaataacacgtgcattaactcaagtgactgatgctaaaaatggcttaaacggtgaagctaaattggcaactgaaaagcaaaatgctaaagatgccgtaagtgggatgacgcatttaaacgatgctcaaaaacaagcattaaaaggtcaaatcgatcaatcgcctgaaattgctacagtgaaccaagttaaacaaacagcaacgagcctagatcaagcaatggatcaattatcacaagctattaatgataaagctcaaacattagcggacggtaattacttaaatgcagatcctgacaaacaaaatgcgtataaacaggcagtagcaaaagctgaagcattattgaataaacaaagtggtactaatgaagtacaagcacaagttgaaagcatcactaatgaagtgaacgcagcgaaacaagcattaaatggtaatgacaatttggcaaatgcaaaacaacaagcaaaacaacaattggcgaacttaacacacttaaatgatgcacaaaaacaatcatttgaaagtcaaattacacaagcgccacttgttacagatgtcactacgattaatcaaaaagcacaaacgttagatcatgcgatggaattattaagaaatagtgttgcggataatcaaacgacattagcgtctgaagattatcatgatgcaactgcgcaaagacaaaatgactataaccaagctgtaacagctgctaataatatcattaatcaaactacatcgcctacgatgaatccagatgatgttaatggtgcaacgacacaagtgaataatacgaaagttgcattagatggtgatgaaaaccttgcagcagctaaacaacaagcaaacaacagacttgatcaattagatcatttgaataatgcgcaaaagcaacagttacaatcacaaattacgcaatcatctgatattgctgcagttaatggtcacaaacaaacagcagaatctttaaatactgcgatgggtaacttaattaatgcgattgcagatcatcaagccgttgaacaacgtggtaacttcatcaatgctgatactgataaacaaactgcttataatacagcggtaaatgaagcagcagcaatgattaacaaacaaactggtcaaaatgcgaaccaaacagaagtagaacaagctattactaaagttcaaacaacacttcaagcgttaaatggagaccataatttacaagttgctaaaacaaatgcgacgcaagcaattgatgctttaacaagcttaaatgatcctcaaaaaacagcattaaaagaccaagttacagctgcaactttagtaactgcagttcatcaaattgaacaaaatgcgaatacgcttaaccaagcaatgcatggtttaagacagagcattcaagataacgcagcaactaaagcaaatagcaaatatatcaacgaagatcaaccagagcaacaaaactatgatcaagctgttcaagccgcaaataatattatcaatgaacaaactgcaacattagataataatgcgattaatcaagcagcgacaactgtgaatacaacgaaagcagcattacatggtgatgtgaagttacaaaatgataaagatcatgctaagcaaacggttagtcaattagcacatctaaacaatgcacaaaaacatatggaagatacgttaattgatagtgaaacaactagaacagcagttaagcaagatttgactgaagcacaagcattagatcaacttatggatgcattacaacaaagtattgctgacaaagatgcaacacgtgcgagcagtgcatatgtcaatgcagaaccgaataaaaaacaatcctatgatgaagcagttcaaaatgctgagtctatcattgcaggattaaataatccaactatcaataaaggtaatgtatcaagtgcgactcaagcagtaatatcatctaaaaatgcattagatggtgttgaacgattagctcaagataagcaaactgctggaaattctctaaatcatttagatcaattaacaccagctcaacaacaagcgctagaaaatcaaattaataatgcaacaactcgtggcgaagtagcacaaaaattaactgaagcacaagcacttaaccaagcaatggaagctttacgtaatagcattcaagatcaacagcaaacggaagcgggtagcaagtttatcaatgaagataaaccacaaaaagatgcttaccaagcagcagttcaaaatgcaaaagatttaattaatcaaactaacaatccaacgcttgataaagcacaagttgaacaattgacacaagctgttaaccaagctaaagataacctacacggtgatcaaaaacttgcagacgataaacaacatgcggttactgatttaaatcaattaaatggtttgaataatccgcaacgtcaagcacttgaaagccaaataaacaacgcagcaactcgtggcgaagtagcacaaaaattagctgaagcaaaagcgcttgatcaagcaatgtaa

SEQ ID NO: 7560 - protein, 8824 aa, Staphylococcus aureus
  misc_feature (2593)..(2593): Xaa can be any naturally occurring amino acid
MNYRDKIQKFSIRKYTVGTFSTVIATLVFLGFNTSQAHAAETNQPASVVKQKQQSNNEQTENRESQVQNSQNSQNGQSLSATHENEQPNISQANLVDQKVAQSSTTNDEQPASQNVNTKKDSATAATTQPDKEQSKHKQNESQSANKNGNDNRAAHVENHEANVVTASDSSDNGNVQHDRNELQAFFDANYHDYRFIDRENADSGTFNYVKGIFDKINTLLGSNDPINNKDLQLAYKELEQAVALIRTMPQRQQTSRRSNRIQTRSVESRAAEPRSVSDYQNANSSYYVENANDGSGYPVGTYINASSKGAPYNLPTTPWNTLKASDSKEIALMTAKQTGDGYQWVIKFNKGHAPHQNMIFWFALPADQVPVGRTDFVTVNSDGTNVQWSHGAGAGANKPLQQMWEYGVNDPHRSHDFKIRNRSGQVIYDWPTVHIYSLEDLSRASDYFSEAGATPATKAFGRQNFEYINGQKPAESPGVPKVYTFIGQGDASYTISFKTQGPTVNKLYYAAGGRALEYNQLFMYSQLYVESTQDHQQRLNGLRQVVNRTYRIGTTKRVEVSQGNVQTKKVLESTNLNIDDFVDDPLSYVKTPSNKVLGFYSNNANTNAFRPGGAQQLNEYQLSQLFTDQKLQEAARTRNPIRLMIGFDYPDAYGNSETLVPVNLTVLPEIQHNIKFFKNDDTQNIAEKPFSKQAGHPVFYVYAGNQGNASVNLGGSVTSIQPLRINLTSNENFTDKDWQITGIPRTLHIENSTNRPNNARERNIELVGNLLPGDYFGTIRFGRKEQLFEIRVKPHTPTITTTAEQLRGTALQKVPVNISGIPLDPSALVYLVAPTNQTTNGGSEADQIPSGYTILATGTPDGVHNTITIRPQDYVVFIPPVGKQIRAVVYYNKVVASNMSNAVTILPDDIPPTINNPVGINAKYYRGDEVNFTMGVSDRHSGIKNTTITTLPNGWTSNLTKADKNNGSLSITGRVSMNQAFNSDITFKVSATDNVNNTTNDSQSKHVSIHVGKISEDAHPIVLGNTEKVVVVNPTAVSNDEKQSIITAFMNKNQNIRGYLASTDPVTVDNNGNVTLHYRDGSSTTLDATNVMTYEPVVKPEYQTVNAAKTATVTIAKGQSFSIGDIKQYFTLSNGQPIPSGTFTNITSDRTIPTAQEVSQMNAGTQLYHITATNAYHKDSEDFYISLKIIDVKQPEGDQRVYRTSTYDLTTDEISKVKQAFINANRDVITLAEGDISVTNTPNGANVSTITVNINKGRLTKSFASNLANMNFLRWVNFPQDYTVTWTNAKIANRPTDGGLSWSDDHKSLIYRYDATLGTQITTNDILTMLKATTTVPGLRNNITGNEKSQAEAGGRPNFRTTGYSQSNATTDGQRQFTLNGQVIQVLDIINPSNGYGGQPVTNSNTRANHSNSTVVNVNEPAANGAGAFTIDHVVKSNSTHNASDAVYKAQLYLTPYGPKQYVEHLNQNTGNTTDAINIYFVPSDLVNPTISVGNYTNHQVFSGETFTNTITANDNFGVQSVTVPNTSQITGTVDNNHQHVSATAPNVTSATNKTINLLATDTSGNTATTSFNVTVKPLRDKYRVGTSSTAANPVRIANISNNATVSQADQTTIINSLTFTETVPNRSYARASANEITSKTVSNVSRTGNNANVTVTVTYQDGTTSTVTVPVKHVIPEIVAHSHYTVQGQDFPAGNGSSASDYFKLSNGSDIADATITWVSGQAPNKDNTRIGEDITVTAHILIDGETTPITKTATYKVVRTVPKHVFETARGVLYPGVSDMYDAKQYVKPVNNSWSTNAQHMNFQFVGTYGPNKDVVGISTRLIRVTYDNRQTEDLTILSKVKPDPPRIDANSVTYKAGLTNQEIKVNNVLNNSSVKLFKADNTPLNVTNITHGSGFSSVVTVSDALPNGGIKAKSSISMNNVTYTTQDEHGQVVTVTRNESVDSNDSATVTVTPQLQATTEGAVFIKGGDGFDFGHVERFIQNPPHGATVAWHDSPDTWKNTVGNTHKTAVVTLPNGQGTRNVEVPVKVYPVANAKAPSRDVKGQNLTNGTDAMNYITFDPNTNTNGITAAWANRQQPNNQQAGVQHLNVDVTYPGISAAKRVPVTVNVYQFEFPQTTYTTTVGGTLASGTQASGYAHMQNATGLPTDGFTYKWNRDTTGTNDANWSAMNKPNVAKVVNAKYDVIYNGHTFATSLPAKFVVKDVQPAKPTVTETAAGAITIAPGANQTVNTHAGNVTTYADKLVIKRNGNVVTTFTRRNNTSPWVKEASAATVAGIAGTNNGITVAAGTFNPADTIQVVATQGSGETVSDEQRSDDFTVVAPQPNQATTKIWQNGHIDITPNNPSGHLINPTQAMDIAYTEKVGNGAEHSKTINVVRGQNNQWTIANKPDYVTLDAQTGKVTFNANTIKPNSSITITPKAGTGHSVSSNPSTLTAPAAHTVNTTEIVKDYGSNVTAAEINNAVQVANKRTATIKNGTAMPTNLAGGSTTTIPVTVTYNDGSTEEVQESIFTKADKRELITAKNHLDDPVSTEGKKPGTITQYNNAMHNAQQQINTAKTEAQQVINNERATPQQVSDALTKVRAAQTKIDXAKALLQNKEDNSQLVTSKNNLQSSVNQVPSTAGMTQQSIDNYNAKKREAETEITAAQRVIDNGDATAQQISDEKHRVDNALTALNQAKHDLTADTHALEQAVQQLNRTGTTTGKKPASITAYNNSIRALQSDLTSAKNSANAIIQKPIRTVQEVQSALTNVNRVNERLTQAINQLVPLADNSALKTAKTKLDEEINKSVTTDGMTQSSIQAYENAKRAGQTESTNAQNVINNGDATDQQIAAEKTKVEEKYNSLKQAIAGLTPDLAPLQTAKTQLQNDIDQPTSTTGMTSASIAAFNEKLSAARTKIQEIDRVLASHPDVATIRQNVTAANAAKSALDQARNGLTVDKAPLENAKNQLQHSIDTQTSTTGMTQDSINAYNAKLTAARNKIQQINQVLAGSPTVEQINTNTSTANQAKSDLDHARQALTPDKAPLQTAKTQLEQSINQPTDTTGMTTASLNAYNQKLQAARQKLTEINQVLNGNPTVQNINDKVTEANQAKDQLNTARQGLTLDRQPALTTLHGASNLNQAQQNNFTQQINAAQNHAALETIKSNITALNTAMTKLKDSVADNNTIKSDQNYTDATPANKQAYDNAVNAAKGVIGETTNPTMDVNTVNQKAASVKSTKDALDGQQNLQRAKTEATNAITHASDLNQAQKNALTQQVNSAQNVQAVNDIKQTTQSLNTAMTGLKRGVANHNQVVQSDNYVNADTNKKNDYNNAYNHANDIINGNAQHPVITPSDVNNALSNVTSKEHALNGEAKLNAAKQEANTALGHLNNLNNAQRQNLQSQINGAHQIDAVNTIKQNATNLNSAMGNLRQAVADKDQVKRTEDYADADTAKQNAYNSAVSSAETIINQTTNPTMSVDDVNRATSAVTSNKNALNGYEKLAQSKTDAARAIDALPHLNNAQKADVKSKINAASNIAGVNTVKQQGTDLNTAMGNLQGAINDEQTTLNSQNYQDATPSKKTAYTNAVQAAKDILNKSNGQNKTKDQVTEAMNQVNSAKNNLDGTRLLDQAKQTAKQQLNNMTHLTTAQKTNLTNQINSGTTVAGVQTVQSNANTLDQAMNTLRQSIANKDATKASEDYVDANNDKQTAYNNAVAAAETIINANSNPEMNPSTITQKAEQVNSSKRALNGDENLAAAKQNAKTYLNTLTSITDAQKNNLISQITSATRVSGVDTVKQNAQHLDQAMASLQNGINNESQVKSSEKYRDADTNKQQEYDNAITAAKAILNKSTGPNTAQNAVEAALQRVNNAKDALNGDAKLIAAQNAAKQHLGTLTHITTAQRNDLTNQISQATNLAGVESVKQNANSLDGAMGNLQTAINDKSGTLASQNFLDADEQKRNAYNQAVSAAETILNKQTGPNTAKTAVEQALNNVNNAKHALNGTQNLNNAKQAAITAINGASDLNQKQKDALKAQANGAQRVSNAQDVQHNATELNTAMGTLKHAIADKTNTLASSKYVNADSTKQNAYTTKVTNAEHIISGTPTVVTTPSEVTAAANQVNSAKQELNGDERLREAKQNANTAIDALTQLNTPQKAKLKEQVGQANRLEDVQTVQTNGQALNNAMKGLRDSIANETTVKTSQNYTDASPNNQSTYNSAVSNAKGIINQTNNPTMDTSAITQATTQVNNAKNGLNGAENLRNAQNTAKQNLNTLSHLTNNQKSAISSQIDRAGHVSEVTATKNAATELNTQMGNLEQAIHDQNTVKQSVKFTDADKAKRDAYTNAVSRAEAILNKTQGANTSKQDVEAAIQNVSSAKNALNGDQNVTNAKNAAKNALNNLTSINNAQKRDLTTKIDQATTVAGVEAVSNTSTQLNTAMANLQNGINDKTNTLASENYHDADSDKKTAYTQAVTNAENILNKNSGSNLDKTAVENALSQVANAKGALNGNHNLEQAKSNANTTINGLQHLTTAQKDKLKQQVQQAQNVAGVDTVKSSANTLNGAMGTLRNSIQDNTATKNGQNYLDATERNKTNYNNAVDSANGVINATSNPNMDANAINQIATQVTSTKNALDGTHNLTQAKQTATNAIDGATNLNKAQKDALKAQVTSAQRVANVTSIQQTANELNTAMGQLQHGIDDENATKQTQKYRDAEQSKKTAYDQAVAAAKAILNKQTGSNSDKAAVDRALQQVTSTKDALNGDAKLAEAKAAAKQNLGTLNHITNAQRTDLEGQINQATTVDGVNTVKTNANTLDGAMNSLQGSINDKDATLRNQNYLDADESKRNAYTQAVTAAEGILNKQTGGNTSKADVDNALNAVTRAKAALNGADNLRNAKTSATNTIDGLPNLTQLQKDNLKHQVEQAQNVAGVNGVKDKGNTLNTAMGALRTSIQNDNTTKTSQNYLDASDSNKNNYNTAVNNANGVINATNNPNMDANAINGMANQVNTTKAALNGAQNLAQAKTNATNTINNAHDLNQKQKDALKTQVNNAQRVSDANNVQHTATELNSAMTALKAAIADKERTKASGNYVNADQEKRQAYDSKVTNAENIISGTPNATLTVNDVNSAASQVNAAKTALNGDNNLRVAKEHANNTIDGLAQLNNAQKAKLKEQVQSATTLDGVQTVKNSSQTLNTAMKGLRDSIANEATIKAGQNYTDASPNNRNEYDSAVTAAKAIINQTSNPTMEPNTITQVTSQVTTKEQALNGARNLAQAKTTAKNNLNNLTSINNAQKDALTRSIDGATTVAGVNQETAKATELNNAMHSLQNGINDETQTKQTQKYLDAEPSKKSAYDQAVNAAKAILTKASGQNVDKAAVEQALQNVNSTKTALNGDAKLNEAKAAAKQTLGTLTHINNAQRTALDNEITQATNVEGVNTVKAKAQQLDGAMGQLETSIRDKDTTLQSQNYQDADDAKRTAYSQAVNAAATILNKTAGGNTPKADVERAMQAVTQANTALNGIQNLDRAKQAANTAITNASDLNTKQKEALKAQVTSAGRVSAANGVEHTATELNTAMTALKRAIADKAETKASGNYVNADANKRQAYDEKVTAAENIVSGTPTPTLTPADVTNAATQVTNAKTQLNGNHNLEVAKQNANTAIDGLTSLNGPQKAKLKEQVGQATTLPNVQTVRDNAQTLNTAMKGLRDSIANEATIKAGQNYTDASQNKQTDYNSAVTAAKAIIGQTTSPSMNAQEINQAKDQVTAKQQALNGQENLRTAQTNAKQHLNGLSDLTDAQKDAVKRQIEGATHVNEVTQAQNNADALNTAMTNLKNGIQDQNTIKQGVNFTDADEAKRNAYTNAVTQAEQILNKAQGPNTSKDGVETALENVQRAKNELNGNQNVANAKTTAKNALNNLTSINNAQKEALKSQIEGATTVAGVNQVSTTASELNTAMSNLQNGINDEAATKAAQKYTDADREKQTAYNDAVTAAKTLLDKTAGSNDNKAAVEQALQRVNTAKTALNGDERLNEAKNTAKQQVATMSHLTDAQKANLTSQIESGTTVAGVQGIQANAGTLDQAMNQLRQSIASKDATKSSEDYQDANADLQNAYNDAVTNAEGIISATNNPEMNPDTINQKASQVNSANSALNGDEKLAAAKQTAKSDISRLTDLNNAQRTAANAEVDQAPNLAAVTAAKNKATSLNTAMGNLKHALAEKDNTKRSVNYTDADQPKQQAYDTAVTQAEAITNANGSNANETQVQAALNQLNQAKNDLNGDNKVAQAKESAKRALASYSNLNNAQSTAATSQIDNATTVAGVTAAQNTANELNTAMGQLQNGINDQNTVKQQVNFTDADQGKKDAYTNAVTNAQGILDKVHGQNMTKAQVEAALNQVTTAKNALNGDANVRQAKSDAKANLGTLTHLNNAQKQDLTSQIEGATTVNGVNGVKTKAQDLDGAMQRLQSAIANKDQTKASENYIDADPTKKTAFDNAITQAESYLNKDHGANKDKQAVEQAIQSVTSTENALNGDANLQRAKTEAIQAIDNLTHLNTPQKTALKQQVNAAQRVSGVTDLKNSATSLNNAMDQLKQAIADHDTIVASGNYTNASPDKQGAYTDAYNAAKNIVNGSPNVITNAADVTAATQRVNNAETGLNGDTNLATAKQQAKDALRQMTHLSDAQKQSITGQIDSATQVTGVQSVKDNATNLDNAMNQLRNSIANKDDVKASQPYVDADRDKQNAYNTAVTNAENIINATSQPTLDPSAVTQAANQVSTNKTALNGAQNLANKKQETTANINQLSHLNNAQKQDLNTQVTNAPNISTVNQVKTKAEQLDQAMERLINGIQDKDQVKQSVNFTDADPEKQTAYNNAVTAAENIINQANGTNANQSQVEAALSTVTTTKQALNGDRKVTDAKNNANQTLSTLDNLNNAQKGAVTGNINQAHTVAEVTQAIQTAQELNTAMGNLKNSLNDKDTTLGSQNFADADPEKKNAYNEAVHNAENILNKSTGTNVPKDQVEAAMNQVNATKAALNGTQNLEKAKQHANTAIDGLSHLTNAQKEALKQLVQQSTTVAEAQGNEQKANNVDAAMDKLRQSIADNATTKQNQNYTDASQNKKDAYNNAVTTAQGIIDQTTSPTLDPTVINQAAGQVSTTKNALNGNENLEAAKQQASQSLGSLDNLNNAQKQTVTDQINGAHTVDEANQIKQNAQNLNTAMGNLKQAIADKDATKATVNFTDADQAKQQAYNTAVTNAENIISKANGGNATQAEVEQAIKQVNAAKQALNGNANVQHAKDEATALINSSNDLNQAQKDALKQQVQNATTVAGVNNVKQTAQELNNAMTQLKQGIADKEQTKADGNFVNADPDKQNAYNQAVAKAEALISATPDVVVTPSEITAALNKVTQAKNDLNGNTNLATAKQNVQHAIDQLPNLNQAQRDEYSKQITQATLVPNVNAIQQAATTLNDAMTQLKQGIANKAQIKGSENYHDADTDKQTAYDNAVTKAEELLKQTTNPTMDPNTIQQALTKVNDTNQALNGNQKLADAKQDAKTTLGTLDHLNDAQKQALTTQVEQAPDIATVNNVKQNAQNLNNAMTNLNNALQDKTETLNSINFTDADQAKKDAYTNAVSHAEGILSKANGSNASQTEVEQAMQRVNEAKQALNGNDNVQRAKDAAKQVITNANDLNQAQKDALKQQVDAAQTVANVNTIKQTAQDLNQAMTQLKQGIADKDQTKANGNFVNADTDKQNAYNNAVAHAEQIISGTPNANVDPQQVAQALQQVNQAKGDLNGNHNLQVAKDNANTAIDQLPNLNQPQKTALKDQVSHAELVTGVNAIKQNADALNNAMGTLKQQIQANSQVPQSVDFTQADQDKQQAYNNAANQAQQIANGIPTPVLTPDTVTQAVTTMNQAKDALNGDEKLAQAKQEALANLDTLRDLNQPQRDALRNQINQAQALATVEQTKQNAQNVNTAMSNLKQGIANKDTVKASENYHDADADKQTAYTNAVSQAEGIINQTTNPTLNPDEITRALTQVTDAKNGLNGEAKLATEKQNAKDAVSGMTHLNDAQKQALKGQIDQSPEIATVNQVKQTATSLDQAMDQLSQAINDKAQTLADGNYLNADPDKQNAYKQAVAKAEALLNKQSGTNEVQAQVESITNEVNAAKQALNGNDNLANAKQQAKQQLANLTHLNDAQKQSFESQITQAPLVTDVTTINQKAQTLDHAMELLRNSVADNQTTLASEDYHDATAQRQNDYNQAVTAANNIINQTTSPTMNPDDVNGATTQVNNTKVALDGDENLAAAKQQANNRLDQLDHLNNAQKQQLQSQITQSSDIAAVNGHKQTAESLNTAMGNLINAIADHQAVEQRGNFINADTDKQTAYNTAVNEAAAMINKQTGQNANQTEVEQAITKVQTTLQALNGDHNLQVAKTNATQAIDALTSLNDPQKTALKDQVTAATLVTAVHQIEQNANTLNQAMHGLRQSIQDNAATKANSKYINEDQPEQQNYDQAVQAANNIINEQTATLDNNAINQAATTVNTTKAALHGDVKLQNDKDHAKQTVSQLAHLNNAQKHMEDTLIDSETTRTAVKQDLTEAQALDQLMDALQQSIADKDATRASSAYVNAEPNKKQSYDEAVQNAESIIAGLNNPTINKGNVSSATQAVISSKNALDGVERLAQDKQTAGNSLNHLDQLTPAQQQALENQINNATTRGEVAQKLTEAQALNQAMEALRNSIQDQQQTEAGSKFINEDKPQKDAYQAAVQNAKDLINQTNNPTLDKAQVEQLTQAVNQAKDNLHGDQKLADDKQHAVTDLNQLNGLNNPQRQALESQINNAATRGEVAQKLAEAKALDQAM

SEQ ID NO: 7561 - DNA, 26475 bp, Staphylococcus aureus
  misc_feature (7754)..(7754): n is a, c, g or t
gtgaattatcgtgataaaattcaaaagtttagtattcgtaaatatacagttggtacattttcaactgtcattgcgacattggtatttttaggattcaatacatcacaagcacatgctgctgaaacaaatcaaccagcaagcgtggttaaacagaaacaacaaagtaataatgaacagactgagaatcgagaatctcaagtacaaaattctcaaaattcacaaaatggtcaatcattatctgctactcatgaaaatgagcaaccaaatattagtcaagctaatttagtagatcaaaaagtagcgcaatcatctactactaatgatgaacaaccagcatctcaaaatgtaaatacaaagaaagattcggcaacggctgcgacaacacaaccagataaagaacaaagtaagcataaacaaaacgaaagtcaatctgctaataaaaatggaaacgacaatagagcggctcatgtagaaaatcatgaagcaaatgtagtaacagcttcagattcatctgataatggtaacgtacaacatgaccgaaatgaattacaagcgttttttgatgcaaattatcatgattatcgctttattgaccgtgaaaatgcagattctggcacatttaactatgtaaaaggcatttttgataagattaatacgttattaggcagtaatgatccaataaacaataaagacttgcaacttgcatacaaagaattggaacaagctgttgctttaattcgtacaatgcctcaacgtcaacagactagccgacgttcaaatagaattcaaacgcgttcggttgagtcaagagctgcagagcctagatcagtatcagactatcaaaatgcaaattcatcatattatgttgaaaatgctaatgatggttcgggctatcctgttggtacatatatcaatgcttctagtaaaggggcgccatataatttaccaactacaccatggaatacattgaaggcctctgactcaaaggaaattgctcttatgacagcgaaacaaactggagacgggtaccaatgggttattaagtttaataaaggacatgctccacatcaaaatatgatcttttggtttgcattaccagcagaccaagtgccagtaggaagaactgactttgtaacagttaattcagatggaacaaatgtacaatggagtcatggagcaggagcaggtgcaaataaaccacttcaacaaatgtgggaatatggagtaaatgatcctcatcgttcacatgactttaaaataagaaatagaagtggccaagtaatatatgactggccaactgtccatatttattctttagaagatttatctagagcgagtgattattttagtgaagctggagcgacacctgctactaaagcttttggtagacaaaattttgaatatattaatggtcaaaaacctgctgaatcaccgggtgttcctaaagtttatactttcatcggtcaaggtgatgcaagttatacaatttcatttaaaacacaaggtccaactgttaataaattgtactatgcagcaggtgggcgtgctttagagtacaatcaattatttatgtacagtcaactatacgtcgaatcaacgcaagaccatcaacaacgtcttaatggtttaagacaagtggttaatcgtacatatcgcataggtacaactaaacgtgtagaagtgagtcaaggaaatgtacaaacgaaaaaggtattagaaagtacaaacctaaatatagatgattttgttgatgatcctttaagttatgttaagacgccgagtaataaagtgttaggattttattcgaataatgcaaatactaatgcttttagaccgggtggagcccaacaattaaatgaatatcaattaagtcaattatttactgatcaaaaattacaagaagcagcaagaactagaaacccaataagattaatgattggtttcgactatcctgatgcttatggtaatagtgaaactttagttcctgttaacttaacggtattacctgaaatccaacataatattaaattctttaaaaatgacgatactcaaaatattgctgaaaaaccattttcaaaacaagctgggcatccagttttctatgtatatgcaggtaaccaagggaatgcttccgtgaatttaggtggtagcgtaacatctattcaaccattacgtattaatttaacaagtaatgagaattttacagataaagattggcaaattacaggtattccgcgtacattacacattgaaaactcgacaaatagacctaataatgccagagaacgcaatattgaacttgttggtaacttattaccaggggattactttggaacgatacgttttggacgtaaagaacaattattcgaaattcgtgttaaaccacatacaccaacaattacaacgacagctgagcaattaagaggtacagcattacaaaaagtgcctgttaatatttcgggaataccgttggatccatcggcattggtttatttagttgcaccaacaaatcaaactacgaatggtggtagtgaggcagatcaaataccatctggttatacgatacttgcgactggtacacctgatggggtgcataatacaattactatacgaccgcaagattatgttgtattcataccacctgtaggtaaacaaattagagcagtagtttattataataaagtagttgcatctaatatgagtaatgctgttactattttgccagatgacattccaccaacaatcaataatcctgttggaataaatgccaaatactatcgaggcgacgaagtcaactttacaatgggtgtctctgatagacattctggtataaaaaatacaactattacgacattgccgaatggttggacatcaaatttaacaaaagcggataagaataatggctcattatctattacaggtagagtgagtatgaatcaggcatttaacagtgatattacatttaaagtgtcagcgacagacaatgtcaataatacgacaaatgatagtcaatctaaacatgtttcaattcatgtaggtaaaattagtgaagatgctcatccgattgtattaggaaatactgagaaagttgtagtagtcaatccgactgctgtatctaatgatgaaaagcaaagcataattactgcctttatgaataaaaaccaaaatataagaggatatttagcatcaactgatccagtaactgtcgataataatggtaatgtcacattacattaccgtgatggctcatcgacaacgcttgatgctacaaatgtgatgacatacgaaccagttgtgaaacctgaataccaaactgtcaatgctgctaaaacagcaacggtaacgattgctaaaggacaatcatttagtattggtgatattaaacaatattttactttaagtaatggacaacctattccaagtggcacatttacaaatattacatctgatagaactattccaactgcacaagaagttagtcaaatgaacgcaggcacgcagttataccatataactgctacaaatgcgtatcataaagatagtgaagacttctatattagtttgaaaatcatcgatgtgaaacaaccagaaggcgatcaacgtgtatatcgtacatcaacatatgatttaactactgatgaaatctcaaaagtaaaacaagcatttattaatgcaaatagagatgtaattacgcttgccgaaggtgatatttcagttacaaatacacctaatggtgctaatgtaagtactattacagtaaatattaataaaggtcgattaacgaaatcattcgcgtcaaacctagctaatatgaatttcttgcgttgggttaatttcccacaagattatacagtgacatggacgaatgcaaaaattgcaaacagaccaacagatggtggtttatcatggtctgatgaccataaatctttaatttatcgttatgatgctacattaggtactcaaattacgacgaatgatattttaacaatgttaaaagcaacaactacagtgcctggattgcgaaataacattactggtaatgaaaaatcacaagcagaagctggcggaagacctaactttagaacgactggttattcacaatcaaatgcgacaactgatggtcaacgtcaatttacgttgaatggtcaagtgattcaagtgttagacatcatcaacccttcaaacggttatggtgggcaacctgttacaaattcaaatactcgtgcaaaccatagtaactcaactgttgttaacgtaaacgaaccggcagctaatggtgctggcgcatttacaattgaccacgttgtaaaaagtaattctacacataatgcaagtgatgcagtttataaagcacagttatacttaacgccatatggtccaaaacaatatgttgaacatttaaatcaaaatacaggaaatactactgacgctattaacatttattttgtaccaagtgacttagtgaatccaacaatttcagtaggtaattacactaatcatcaagtgttctcaggtgaaacatttacaaatactattacagcgaatgataactttggtgtgcaatctgtaactgtaccaaatacatcacaaattacaggtactgttgataataaccatcaacatgtttctgcaacggcaccaaatgtgacatcagcaactaataagacaatcaatttattagcaactgatacaagcggcaatacagctacaacttcgttcaatgtaacagtgaaacctttgcgtgataaatatcgagttggtacttcatcaacggctgctaatcctgtgagaattgccaatatttcgaataatgcgacagtatcacaagctgatcaaacgacaattattaattcgttaacgtttactgaaacagtaccaaatagaagttatgcaagagcaagtgcgaatgaaatcactagtaaaacagttagtaatgtcagtcgtactggaaataatgccaatgtcacagtaactgttacttatcaagatggaacaacatcaacagtgactgtacctgtaaagcatgtcattccagaaatcgttgcacattcgcattacactgtacaaggccaagacttcccagcaggtaatggttctagtgcatcagattactttaagttatctaatggtagtgacattgcagatgcaactattacatgggtaagtggacaagcgccaaataaagataatacacgtattggtgaagatataactgtaactgcacatatcttaattgatggcgaaacaacgccgattacgaaaacagcaacatataaagtagtaagaactgtaccgaaacatgtctttgaaacagccagaggtgttttatacccaggtgtttcagatatgtatgatgcgaaacaatatgttaagccagtaaataattcttggtcgacaaatgcgcaacatatgaatttccaatttgttggaacatatggtcctaacaaagatgttgtaggcatatctactcgtcttattagagtgacatatgataatagacaaacagaagatttaactattttatctaaagttaaacctgacccacctagaattgacgcaaactctgtgacatataaagcaggtcttacaaaccaagaaattaaagttaataacgtattaaataactcgtcagtaaaattatttaaagcagataatacaccattaaatgtcacaaatattactcatggtagcggttttagttcggttgtgacagtaagtgacgcgttaccaaatggcggaattaaagcaaaatcttcaatttcaatgaacaatgtgacgtatacgacgcaagacgaacatggtcaagttgttacagtaacaagaaatgaatctgttgattcaaatgacagtgcaacagtaacagtgacaccacaattacaagcaactactgaaggcgctgtatttattaaaggtggcgacggttttgatttcggacacgtagaaagatttattcaaaacccgccacatggggcaacggttgcatggcatgatagtccagatacatggaagaatacagtcggtaacactcataaaactgcggttgtaacattacctaatggtcaaggtacgcgtaatgttgaagttccagtcaaagtttatccagttgctaatgcaaaggcgccatcacgtgatgtgaaaggtcaaaatttgactaatggaacggatgcgatgaactacattacatttgatccaaatacaaacacaaatggtatcactgcagcatgggcaaatagacaacaaccaaataaccaacaagcaggcgtgcaacatttaaatgtcgatgtcacatatccaggtatttcagctgctaaacgagttcctgttactgttaatgtatatcaatttgaattccctcaaactacttatacgacaacggttggaggcactttagcaagtggtacgcaagcatcaggatatgcacatatgcaaaatgctactggtttaccaacagatggatttacgtataaatggaatcgtgatactacaggtacaaatgacgcaaactggtcagctatgaataaaccgaatgtggctaaagtcgttaacgcaaaatatgacgtcatctataacggacatacttttgcaacatctttaccagcgaaatttgtagtaaaagatgtgcaaccagcgaaaccaactgtgactgaaacagcggcaggagcgattacaattgcacctggagcaaaccaaacagtgaatacacatgccggtaacgtaacgacatacgctgataaattagttattaaacgtaatggtaacgttgtgacgacatttacacgtcgcaataatacgagtccatgggtgaaagaagcatctgcagcaactgtagcaggtattgctggaactaataatggtattactgttgcagcaggtactttcaaccctgctgatacaattcaagttgttgcaacgcaaggaagcggagagacagtgagtgatgagcaacgtagtgatgatttcacagttgtcgcaccacaaccgaaccaagcgactactaagatttggcaaaatggtcatattgatatcacgcctaataatccatcaggacatttaattaatccaactcaagcaatggatattgcttacactgaaaaagtgggtaatggtgcagaacatagtaagacaattaatgttgttcgtggtcaaaataatcaatggacaattgcgaataagcctgactatgtaacgttagatgcacaaactggtaaagtgacgttcaatgccaatactataaaaccaaattcatcaatcacaattactccgaaagcaggtacaggtcactcagtaagtagtaatccaagtacattaactgcaccggcagctcatactgtcaacacaactgaaattgtgaaagattatggttcaaatgtaacagcagctgaaattaacaatgcagttcaagttgctaataaacgtactgcaacgattaaaaatggcacagcaatgcctactaatttagctggtggtagcacaacgacgattcctgtgacagtaacttacaatgatggtagtactgaagaagtacaagagtccattttcacaaaagcggataaacgtgagttaatcacagctaaaaatcatttagatgatccagtaagcactgaaggtaaaaagccaggtacaattacgcagtacaataatgcaatgcataatgcgcaacaacaaatcaatactgcgaaaacagaagcacaacaagtgattaataatgagcgtgcaacaccacaacaagtttctgacgcactaactaaagttcntgcagcacaaactaagattgatcaagctaaagcattacttcaaaataaagaagataatagccaattagtaacgtctaaaaataacttacaaagttctgtgaaccaagtaccatcaactgctggtatgacgcaacaaagtattgataactataatgcgaagaagcgtgaagcagaaactgaaataactgcagctcaacgtgttattgacaatggcgatgcaactgcacaacaaatttcagatgaaaaacatcgtgtcgataacgcattaacagcattaaaccaagcgaaacatgatttaactgcagatacacatgccttagagcaagcagtgcaacaattgaatcgcacaggtacaacgactggtaagaagccggcaagtattactgcttacaataattcgattcgtgcacttcaaagtgacttaacaagtgctaaaaatagcgctaatgctattattcaaaagccaataagaacagtacaagaagtgcaatctgcgttaacaaatgtaaatcgtgtcaatgagcgattaacgcaagcaattaatcaattagtacctttagctgataatagtgctttaaaaactgctaagacgaaacttgatgaagaaatcaataaatcagtaacgactgatggtatgacacaatcatcaatccaagcatatgaaaatgctaaacgtgcgggtcaaacagaatcaacaaatgcacaaaatgttattaacaatggtgatgcgactgaccaacaaattgccgcagaaaaaacaaaagtagaagaaaaatataatagcttaaaacaagcaattgctggattaactccagacttggcaccattacaaactgcaaaaactcagttgcaaaatgatattgatcagccaacgagtacgactggtatgacaagcgcatctattgcagcatttaatgaaaaactttcagcagctagaactaaaattcaagaaattgatcgtgtattagcctcacatccagatgttgcgacaatacgtcaaaacgtgacagcagcgaatgccgctaaatcagcacttgatcaagcacgtaatggcttaacagtcgataaagcgcctttagaaaatgcgaaaaatcaactacaacatagtattgacacgcaaacaagtacaactggtatgacacaagactctataaatgcatataatgcgaagttaacagctgcacgtaataagattcaacaaatcaatcaagtattagcaggttcaccgactgtagaacaaattaatacaaatacgtctacagcaaatcaagctaaatctgatttagatcatgcacgtcaagctttaacaccagataaagcgccgcttcaaactgcgaaaacgcaattagaacaaagcattaatcaaccaacggatacaacaggtatgacgaccgcttcgttaaatgcgtacaaccaaaaattacaagcagcgcgtcaaaagttaactgaaattaatcaagtgttgaatggcaacccaactgtccaaaatatcaatgataaagtgacagaggcaaaccaagctaaggatcaattaaatacagcacgtcaaggtttaacattagatagacagccagcgttaacaacattacatggtgcatctaacttaaaccaagcacaacaaaataatttcacgcaacaaattaatgctgctcaaaatcatgctgcgcttgaaacaattaagtctaacattacggctttaaatactgcgatgacgaaattaaaagacagtgttgcggataataatacaattaaatcagatcaaaattacactgacgcaacaccagctaataaacaagcgtatgataatgcagttaatgcggctaaaggtgtcattggagaaacgactaatccaacgatggatgttaacacagtgaaccaaaaagcagcatctgttaaatcgacgaaagatgctttagatggtcaacaaaacttacaacgtgcgaaaacagaagcaacaaatgcgattacgcatgcaagtgatttaaaccaagcacaaaagaatgcattaacacaacaagtgaatagtgcacaaaacgtgcaagcagtaaatgatattaaacaaacgactcaaagcttaaatactgctatgacaggtttaaaacgtggcgttgctaatcataaccaagtcgtacaaagtgataattatgtcaacgcagatactaataagaaaaatgattacaacaatgcatacaaccatgcgaatgacattattaatggtaatgcacaacatccagttataacaccaagtgatgttaacaatgctttatcaaatgtcacaagtaaagaacatgcattgaatggtgaagctaagttaaatgctgcgaaacaagaagcgaatactgcattaggtcatttaaacaatttaaataatgcacaacgtcaaaacttacaatcgcaaattaatggtgcgcatcaaattgatgcagttaatacaattaagcaaaatgcaacaaacttgaatagtgcaatgggtaacttaagacaagctgttgcagataaagatcaagtgaaacgtacagaagattatgcggatgcagatacagctaaacaaaatgcatataacagtgcagtttcaagtgccgaaacaatcattaatcaaacaacaaatccaacgatgtctgttgatgatgttaatcgtgcaacttcagctgttacttctaataaaaatgcattaaatggttatgaaaaattagcacaatctaaaacagatgctgcaagagcaattgatgcattaccacatttaaataatgcacaaaaagcagatgttaaatctaaaattaatgctgcatcaaatattgctggcgtaaatactgttaaacaacaaggtacagatttaaatacagcgatgggtaacttgcaaggtgcaatcaatgatgaacaaacgacgcttaatagtcaaaactatcaagatgcgacacctagtaagaaaacagcatacacaaatgcggtacaagctgcgaaagatattttaaataaatcaaatggtcaaaataaaacgaaagatcaagttactgaagcgatgaatcaagtgaattctgctaaaaataacttagatggtacgcgtttattagatcaagcgaagcaaacagcaaaacagcagttaaataatatgacgcatttaacaactgcacaaaaaacgaatttaacaaaccaaattaatagtggtactactgtcgctggtgttcaaacggttcaatcaaatgccaatacattagatcaagccatgaatacgttaagacaaagtattgccaacaaagatgcgactaaagcaagtgaagattacgtagatgctaataatgataagcaaacagcatataacaacgcagtagctgctgctgaaacgattattaatgctaatagtaatccagaaatgaatccaagtacgattacacaaaaagcagagcaagtgaatagttctaaaagggcacttaacggtgatgaaaacttagctgctgcaaaacaaaatgcgaaaacgtacttaaacacattgacaagtattacagatgctcaaaagaacaatttgattagtcaaattactagtgcgacaagagtgagtggtgttgatactgtaaaacaaaatgcgcaacatctagaccaagctatggctagcttacagaatggtattaacaacgaatctcaagtgaaatcatctgagaaatatcgtgatgctgatacaaataaacaacaagagtatgataatgctattactgcagcgaaagcgattttaaataaatcgacaggtccaaacactgcgcaaaatgcagttgaagcagcattacaacgtgttaataatgcgaaagatgcattgaatggtgatgcaaaattaattgcagctcaaaacgcagcgaaacaacatttaggtactttaacgcatatcactacagctcaacgtaatgatttaacaaatcaaatttcacaagctacaaacttagctggtgttgaatctgttaaacaaaatgcgaatagtttagatggtgctatgggtaacttacaaacggctatcaacgataagtcaggaacattagcgagccaaaacttcttggatgctgatgagcaaaaacgtaatgcatacaatcaagctgtatcagcagccgaaaccattttaaataaacaaactggaccgaatacagcgaaaacagcagtcgaacaagcacttaataatgttaataatgcgaaacatgcattaaatggtacgcaaaacttaaacaatgcgaaacaagcagcgattacagcaatcaatggcgcatctgatttaaatcaaaaacaaaaagatgcattaaaagcacaagctaatggtgctcaacgcgtatctaatgcacaagatgtacagcacaatgcgactgaactgaacacggcaatgggcacattaaaacatgccatcgcagataagacgaatacgttagcaagcagtaaatatgttaatgccgatagcactaaacaaaatgcttacacaactaaagttaccaatgctgaacatattattagcggtacgccaacggttgttacgacaccttcagaagtaacagctgcagctaatcaagtaaacagcgcgaaacaagaattaaatggtgacgaaagattacgtgaagcaaaacaaaacgccaatactgctattgatgcattaacacaattaaatacacctcaaaaagctaaattaaaagaacaagtgggacaagccaatagattagaagacgtacaaactgttcaaacaaatggacaagcattgaacaatgcaatgaaaggcttaagagatagtattgctaacgaaacaacagtcaaaacaagtcaaaactatacagacgcaagtccgaataaccaatcaacatataatagcgctgtgtcaaatgcgaaaggtatcattaatcaaactaacaatccgactatggatactagtgcgattacccaagctacaacacaagtgaataatgctaaaaatggtttaaacggtgctgaaaacttaagaaatgcacaaaacactgctaagcaaaacttaaatacattatcacacttaacaaataaccaaaaatctgccatctcatcacaaattgatcgtgcaggtcatgtgagtgaggtaactgctactaaaaatgcagcaactgagttgaatacgcaaatgggtaacttggaacaagctatccatgatcaaaacacagttaaacaaagtgttaaatttactgatgcagataaagctaaacgtgatgcgtatacaaatgcggtaagcagagctgaagcaattctgaataaaacgcaaggtgcaaatacgtctaaacaagatgttgaagcggctattcaaaatgtttcaagtgctaaaaatgcattgaatggtgatcaaaacgttacaaatgcgaagaatgcagctaaaaatgcattaaataacttaacgtcaattaataatgcacaaaaacgtgacttaacaactaaaattgatcaagcaacaactgtagctggtgttgaagctgtatctaatacgagtacacaattgaatacagcgatggctaacttgcaaaatggtattaatgataaaacaaatacactagcaagtgaaaactatcatgatgctgattcagataagaaaactgcttatactcaagccgttacgaacgcagaaaatattttaaataaaaatagtggatcaaatttagacaaaactgccgttgaaaacgcgttgtcacaagttgctaatgcgaaaggtgccctaaatggtaaccataatttagagcaagctaaatcaaatgcaaacactactataaacggacttcaacatttaacaactgctcaaaaagataaattgaaacaacaagtgcaacaagcacaaaatgttgcaggtgtagatactgttaaatcaagtgccaacacattaaatggtgctatgggtacgttaagaaatagcatacaagataacacagctacgaaaaatggccaaaactatcttgatgctacagaacgtaacaaaacaaactataacaatgctgttgatagtgctaatggcgtcattaatgcaacaagcaatccaaatatggatgctaatgcaattaaccaaatcgctacacaagtgacatcaacgaaaaatgcattagatggtacacataatttaacgcaagcgaaacaaacagcaacaaatgccatcgatggtgctactaacttaaataaagcgcaaaaagatgcgttaaaagcacaagttacaagtgcgcaacgtgttgcaaatgtaacaagtatccaacaaactgcaaatgaacttaatacagctatgggtcaattacaacatggtattgatgatgaaaatgcaacaaaacaaactcaaaaatatcgtgacgctgaacaaagtaagaaaactgcttatgatcaagctgtagctgctgcgaaagcaattttaaataaacaaacaggttcaaattcagataaagcagcagttgaccgtgcattacaacaagtaacaagtacgaaagatgcattgaatggtgatgcaaaactggcagaagcgaaagcggcagctaaacaaaacttaggcactttaaaccatattacgaatgcacaacgtactgacttagaaggccaaatcaatcaagcgacgactgttgatggcgttaatactgtaaaaacaaatgccaatacattagacggcgcaatgaatagcttacaaggttcaatcaatgataaagatgcgacattaagaaatcaaaattatcttgatgcggatgaatcaaaacgaaatgcatatacgcaagctgtcacagcggctgaaggcattttaaataaacaaactggtggtaacacatctaaagcagacgttgataatgcattaaatgcagttacaagagcgaaagcggctttaaatggtgctgacaacttaagaaatgcgaaaacttcagcaacaaatacgattgatggtttacctaacttaacacaattacaaaaagacaacttgaagcatcaagttgaacaagcgcaaaatgtagcaggtgtaaatggtgttaaagataaaggtaatacgttaaatactgccatgggtgcattacgtacaagtatccaaaatgataatacgacgaaaacaagtcaaaattatcttgatgcatctgacagcaacaaaaataattacaatactgctgtaaataatgcaaatggtgttattaatgcaacgaacaatccaaatatggatgctaatgcgattaatggcatggcaaatcaagtcaatacaacaaaagcagcgttaaatggtgcacaaaacttagctcaagctaaaacaaatgcgacgaacacaattaacaacgcacatgacttaaaccaaaaacaaaaagatgcattaaaaacacaagttaacaatgcacaacgtgtatctgatgcaaataacgttcaacacactgcaactgaattgaacagtgcgatgacagcacttaaagcagctattgctgataaagaaagaacaaaagcaagcggtaattatgtcaatgctgatcaagaaaaacgtcaagcgtatgattcaaaagtgactaacgctgaaaatatcattagtggtacaccgaatgcgacattaacagtcaatgacgtaaatagtgcggcatcacaagtcaatgcggctaaaacagcattaaatggtgataacaacttacgtgtagcgaaagagcatgccaacaatacaattgacggcttagcacaattgaataatgcacaaaaagcaaaattaaaagaacaagttcaaagtgcaactacattagatggtgttcaaactgttaaaaatagttctcaaacgttgaatacagcgatgaaaggcttaagagatagtattgcgaatgaagcaacaattaaagcaggtcaaaactacactgacgcaagtccaaataatcgtaacgagtacgacagtgcagttactgcagcaaaagcaatcattaatcaaacatcgaacccaacgatggaaccaaatactattacgcaagtaacatcacaagtgacaactaaagaacaggcattaaatggtgcgcgaaacttagctcaagctaagacaactgcgaaaaacaacttgaataacttaacatcaattaacaatgcacaaaaagatgcgttaacgcgtagcattgatggtgcaacaacagtagctggtgtaaatcaagaaactgcaaaagcaacagaattaaataacgcaatgcatagtttacaaaatggtatcaatgatgagacacaaacaaaacaaactcagaaatacctagatgcagagccaagtaagaaatcagcttatgatcaagcagtaaatgcagcgaaagcaattttaacaaaagctagtggtcaaaatgtagacaaagcagcagttgaacaagcattgcaaaatgtgaacagtacgaagacggcgttgaacggtgatgcgaaattaaatgaagctaaagcagctgcgaaacaaacgttaggtacattaacacacattaataatgcacaacgtacagcgttagacaatgaaattacacaagcaacaaatgttgaaggtgttaatacagttaaagccaaagcgcaacaattagatggtgctatgggtcaattagaaacatcaattcgtgataaagacacgacgttacaaagtcaaaattatcaagatgctgatgatgctaaacgaactgcttattctcaagcagtaaatgcagcagcaactattttaaataaaacagctggcggtaatacacctaaagcagatgttgaaagagcaatgcaagctgttacacaagcaaatactgcattaaacggtattcaaaacttagatcgtgcgaaacaggctgctaacacagcgattacaaatgcttcggacttaaatacaaaacaaaaagaagcattaaaagcacaagtaacaagtgcaggacgtgtatctgcagcaaatggtgttgaacatactgcgactgaattaaatactgcgatgacagctttaaagcgtgccattgctgataaagctgagacaaaagctagtggtaactatgtcaatgctgatgcgaataaacgtcaagcatatgatgaaaaagttacagctgccgaaaatatcgttagtggtacaccaacaccaacgttaacaccagcagatgttacaaatgcagcaacgcaagtaacgaatgctaagacgcagttaaacggtaatcataatttagaagtagcgaaacaaaatgctaacactgcaattgatggtttaacttctttaaatggtccgcaaaaagcaaaacttaaagaacaagtgggtcaagcgacgacgttgccaaatgttcaaactgttcgtgataatgcacaaacattaaacactgcaatgaaaggtctacgagatagcattgcgaatgaagcaacgattaaagcaggtcaaaactacacagatgcaagtcaaaacaaacaaactgactacaacagtgcagtcactgcagcaaaagcaatcattggtcaaacaactagtccatcaatgaatgcgcaagaaattaatcaagcgaaagaccaagtgacagctaaacaacaagcgttaaacggtcaagaaaacttaagaactgcgcaaacaaatgcgaagcaacatttgaacggcttaagtgacttaactgacgctcaaaaagatgcagtgaaacgtcaaatcgaaggtgcaacgcatgttaatgaagtaacacaagcacaaaataatgcggatgcattaaatacagctatgacgaacttgaaaaatggtattcaagatcagaatacgattaagcaaggtgttaacttcactgatgccgacgaagcgaaacgtaatgcatatacaaatgcagtgacgcaagctgaacaaattttaaataaagcacaaggtccaaatacttcaaaagacggtgtcgaaactgcgttagaaaatgtacaacgtgctaaaaacgaattgaacggtaatcaaaatgttgcgaacgctaagacaactgcgaaaaatgcattgaataacctaacatcaattaataatgcacaaaaagaagcattgaaatcacaaattgaaggtgcgacaacagttgcaggtgtaaatcaagtgtctacaacggcatctgaattaaatacagcaatgagcaacttacaaaatggtattaatgatgaagcagctacaaaagcagctcagaaatatactgatgcagatagagaaaaacaaactgcatacaatgacgctgtaacagcagctaaaacgttattagataaaacagctggttcaaatgacaataaagcagctgttgaacaagcattacaacgtgtgaatactgctaaaacagcattaaatggtgacgagcgattaaatgaagcgaagaacacagctaaacaacaagtagcgacaatgtcacacttaactgatgctcaaaaagcaaacttaacatcgcaaatcgaaagtggtacgactgttgcaggtgttcaaggtattcaagctaatgccggtactttagatcaagcaatgaatcaattaagacaaagtattgcttctaaagatgcgactaaatcaagcgaagattatcaagacgcgaatgcagatttacaaaatgcatacaatgatgcggtaactaatgctgaaggtattattagtgcaacgaataaccctgaaatgaatcctgatacaattaaccaaaaagcgagccaagtgaacagtgcgaattctgcattgaacggtgatgaaaaattagcagcagcaaaacaaactgcgaaatcagatatcagtcgtttgacagacttgaacaatgcacaacgaactgcggcaaatgctgaagtggatcaagcaccaaatcttgcagctgtcacagcggctaaaaacaaagcaacatcgttaaacacagcgatgggtaatttgaaacatgcacttgctgaaaaggataatacgaaacgtagtgtcaattacacagatgcggatcaaccaaaacaacaagcgtatgatactgcggttacacaagcagaagcaattactaatgctaatggcagcaacgcgaatgaaacacaagttcaagcagcactaaaccaattgaatcaagctaaaaatgacttgaatggtgataataaagttgctcaagcaaaagagtcagcgaaacgtgcattagcttcatatagtaacttgaataatgcgcaatcaactgcagcaactagtcaaattgacaatgcaacgacagtagcaggcgtaactgctgcacaaaatactgctaatgaattaaatacagcaatgggtcaacttcaaaatggtataaatgaccaaaacactgttaaacaacaagtgaactttacagatgctgaccaaggtaagaaagatgcttacacaaatgctgttacgaatgctcaaggtattttagataaagtacacggtcaaaatatgacgaaagcacaagttgaagctgcattaaatcaagtaacgactgctaagaatgctttaaacggtgacgcaaatgtaagacaagcaaaatcagatgcgaaagcaaacttaggtacattaacacacttaaataatgcacaaaaacaagatttaacatcacaaatcgaaggcgcaacaacagtcaacggtgtaaatggtgttaaaacgaaagcacaagacttagatggtgcaatgcaacgattacaatcagctatagcaaataaagatcaaactaaagcgagcgaaaattacatcgacgcagatccaactaagaaaacagcatttgataatgctatcacacaagctgaatcttacttaaataaagatcacggtgcgaataaagataagcaagctgttgaacaagcaattcaaagtgtaacgtctactgaaaatgctttgaacggtgacgcgaacttacaacgcgctaaaactgaagctatacaagctatcgataacttgacacatttgaatacaccacaaaaaacagcattaaaacaacaagtgaacgctgcgcaacgtgtatcaggtgtaactgatctgaaaaatagtgctacatcacttaataatgcgatggatcaattaaaacaagcaattgctgatcatgacacaattgtagctagtggtaattacactaacgcgagtcctgataagcaaggtgcttatactgatgcatataatgctgcgaaaaacattgtaaatggttcgcctaatgtgattacaaatgcagcagatgttacagcagcaacacaacgtgttaataatgctgaaacaggtttaaacggtgatacaaacttagcaactgcgaagcaacaagctaaagatgcattacgtcaaatgacacatttatctgatgcacaaaaacaaagtattactggtcaaattgatagcgcgacacaagtaactggcgttcaaagtgtgaaagacaacgcgacaaatcttgataatgcaatgaatcaacttcgaaatagtattgcgaataaagatgatgtaaaagcgagtcaaccatatgttgatgcagatagagataaacaaaatgcatacaatacagcagttacaaatgctgaaaatatcattaatgcaacgagtcagccgacacttgatccatctgcagtaacacaagcagctaatcaagtgagcactaacaaaactgcgcttaatggtgcacaaaacttagcgaataaaaagcaagaaacgactgctaacatcaaccaattaagtcatttaaataatgctcaaaagcaagatttaaatacgcaagtgacaaatgcaccaaatattagcacagtaaatcaagtgaaaactaaagctgaacaattagatcaagcaatggaacgtttaatcaacggaatccaagacaaagatcaagtgaaacaaagtgttaactttacagatgcagatccagaaaaacaaacagcatacaacaatgcggtaactgctgctgaaaatattattaatcaagcaaatggtacaaatgcgaaccaatcacaagttgaagcagcactttcaactgtaacaactacgaaacaagcgttgaatggtgatagaaaagtaacagatgctaaaaacaatgcaaaccaaacattatctacgttagataacttaaacaatgcacaaaaaggtgctgttactggaaacatcaatcaagcgcacactgtagctgaagtaacgcaagccattcaaaccgctcaggaactgaatacagcgatgggtaacttgaaaaatagcttgaatgataaagacactacacttggcagtcaaaactttgcagatgcagatccagagaagaaaaatgcatacaatgaagcggttcataatgctgaaaatattttaaataaatctacaggtacgaacgtgcctaaagatcaagttgaagcagctatgaatcaagtgaatgctacaaaagcagcgcttaatggtactcaaaaccttgaaaaagctaaacaacacgcaaatacagcaattgacggtttaagccatttaacaaatgcacaaaaagaggcattaaaacaattggtacaacaatcgactactgttgcagaagcacaaggtaatgagcaaaaagcaaacaatgttgatgcagcaatggacaaattacgtcaaagtattgcagataatgcgacaacaaaacaaaaccaaaattatactgatgcaagtcagaataaaaaggatgcgtacaataatgctgtcacaactgcacaaggtattattgatcaaactacaagtccaactttagatccgactgttatcaatcaagctgctggacaagtaagcacaactaaaaatgcattaaatggtaatgaaaacctagaggcagcgaaacaacaagcgtcacaatcattaggttcattagataacttaaataatgcgcaaaaacaaacagttactgatcaaattaatggcgcgcatactgttgatgaagcaaatcaaattaagcaaaatgcgcaaaacttaaatacagcgatgggtaacttgaaacaagcgatagctgacaaagatgctacgaaagcgacagttaacttcactgatgcagatcaagcaaaacaacaagcatataacactgctgttacaaatgctgaaaatatcatttcaaaagctaatggcggcaatgcaacacaagctgaagttgaacaagcaatcaaacaagttaatgctgcaaaacaagcattaaatggtaatgccaacgttcaacatgcaaaagacgaagcaacagcattaattaatagctctaatgaccttaaccaagcacaaaaagacgcattaaaacaacaagttcaaaatgcaactactgtagctggtgtaaacaatgttaaacaaacagcacaagagttaaacaatgctatgacacaattaaaacaaggcattgcagataaagaacaaacaaaagctgatggtaactttgtcaatgcagatcctgataagcaaaatgcatataatcaagcagtagcgaaagctgaagcattaattagtgctacgcctgatgttgtcgttacacctagcgaaattactgcagcgttaaataaagttacgcaagctaaaaatgatttaaatggtaatacaaacttagcaacggcgaaacaaaatgttcaacatgctattgatcaattgccaaacttaaaccaagcgcaacgtgatgaatacagcaaacaaatcacgcaagcaacacttgtaccaaacgtcaatgctattcaacaagcggcgacaacgcttaatgacgcgatgacacaattgaaacaaggtattgcgaataaagcacaaattaaaggtagcgagaactatcacgatgctgatactgacaagcaaacagcatatgataatgcagtaacaaaagcagaagaattgttaaaacaaacaacaaatccaacaatggatccaaatacaattcaacaagcattaactaaagtgaatgacacaaatcaagcacttaacggtaatcaaaaattagctgatgccaaacaagatgctaagacaacacttggtacactagatcatttaaatgatgctcaaaaacaagcgctaacaactcaagttgaacaagcaccagatattgcaacagttaataatgttaagcaaaatgctcaaaatctgaataatgctatgactaacttaaacaatgcattacaagataaaactgagacattaaatagcattaactttactgatgcagatcaagctaagaaagatgcttatactaatgcggtttcacatgcagaaggtattttatctaaagcaaatggcagcaatgcaagtcaaactgaagtggaacaagcgatgcaacgtgtgaacgaagcgaaacaagcattgaatggtaatgacaatgtacaacgtgcaaaagatgcagcgaaacaagtgattacaaatgcaaatgatttaaatcaagcgcaaaaagatgcattaaaacaacaagtcgatgctgcgcaaactgttgcaaatgtaaacacgattaagcaaacagcacaagatttaaatcaagcaatgacacaattgaaacaaggtattgcagataaagaccaaactaaagcaaatggtaactttgtcaatgctgatactgataagcaaaatgcttacaacaatgcggtagcacatgctgaacaaataattagtggtacaccaaatgcaaacgtggatccacaacaagtggctcaagcgttacaacaagtgaatcaagctaagggtgatttaaacggtaaccataacttacaagttgctaaagacaatgcaaatacagccattgatcagttaccaaacttaaatcaaccacaaaaaacagcattaaaagaccaagtgtcgcatgcagaacttgttacaggtgttaatgctattaagcaaaatgctgatgcgttaaataatgcaatgggtacattgaaacaacaaattcaagcgaacagtcaagtaccacagtcagttgactttacacaagcggatcaagacaaacaacaagcatataacaatgcggctaaccaagcgcaacaaatcgcaaatggcataccaacacctgtattgacgcctgatacagtaacacaagcagtgacaactatgaatcaagcgaaagatgcattaaacggtgatgaaaaattagcacaagcgaaacaagaagctttagcaaatcttgatacgttacgcgatttaaatcaaccacaacgtgatgcattacgtaaccaaatcaatcaagcacaagcgttagctacagttgaacaaactaaacaaaatgcacaaaatgtgaatacagcaatgagtaacttgaaacaaggtattgcaaacaaagatactgtcaaagcaagtgagaactatcatgatgctgatgccgataagcaaacagcatatacaaatgcagtgtctcaagcggaaggtattatcaatcaaacgacaaatccaacgcttaacccagatgaaataacacgtgcattaactcaagtgactgatgctaaaaatggcttaaacggtgaagctaaattggcaactgaaaagcaaaatgctaaagatgccgtaagtgggatgacgcatttaaacgatgctcaaaaacaagcattaaaaggtcaaatcgatcaatcgcctgaaattgctacagtgaaccaagttaaacaaacagcaacgagcctagatcaagcaatggatcaattatcacaagctattaatgataaagctcaaacattagcggacggtaattacttaaatgcagatcctgacaaacaaaatgcgtataaacaggcagtagcaaaagctgaagcattattgaataaacaaagtggtactaatgaagtacaagcacaagttgaaagcatcactaatgaagtgaacgcagcgaaacaagcattaaatggtaatgacaatttggcaaatgcaaaacaacaagcaaaacaacaattggcgaacttaacacacttaaatgatgcacaaaaacaatcatttgaaagtcaaattacacaagcgccacttgttacagatgtcactacgattaatcaaaaagcacaaacgttagatcatgcgatggaattattaagaaatagtgttgcggataatcaaacgacattagcgtctgaagattatcatgatgcaactgcgcaaagacaaaatgactataaccaagctgtaacagctgctaataatatcattaatcaaactacatcgcctacgatgaatccagatgatgttaatggtgcaacgacacaagtgaataatacgaaagttgcattagatggtgatgaaaaccttgcagcagctaaacaacaagcaaacaacagacttgatcaattagatcatttgaataatgcgcaaaagcaacagttacaatcacaaattacgcaatcatctgatattgctgcagttaatggtcacaaacaaacagcagaatctttaaatactgcgatgggtaacttaattaatgcgattgcagatcatcaagccgttgaacaacgtggtaacttcatcaatgctgatactgataaacaaactgcttataatacagcggtaaatgaagcagcagcaatgattaacaaacaaactggtcaaaatgcgaaccaaacagaagtagaacaagctattactaaagttcaaacaacacttcaagcgttaaatggagaccataatttacaagttgctaaaacaaatgcgacgcaagcaattgatgctttaacaagcttaaatgatcctcaaaaaacagcattaaaagaccaagttacagctgcaactttagtaactgcagttcatcaaattgaacaaaatgcgaatacgcttaaccaagcaatgcatggtttaagacagagcattcaagataacgcagcaactaaagcaaatagcaaatatatcaacgaagatcaaccagagcaacaaaactatgatcaagctgttcaagccgcaaataatattatcaatgaacaaactgcaacattagataataatgcgattaatcaagcagcgacaactgtgaatacaacgaaagcagcattacatggtgatgtgaagttacaaaatgataaagatcatgctaagcaaacggttagtcaattagcacatctaaacaatgcacaaaaacatatggaagatacgttaattgatagtgaaacaactagaacagcagttaagcaagatttgactgaagcacaagcattagatcaacttatggatgcattacaacaaagtattgctgacaaagatgcaacacgtgcgagcagtgcatatgtcaatgcagaaccgaataaaaaacaatcctatgatgaagcagttcaaaatgctgagtctatcattgcaggattaaataatccaactatcaataaaggtaatgtatcaagtgcgactcaagcagtaatatcatctaaaaatgcattagatggtgttgaacgattagctcaagataagcaaactgctggaaattctctaaatcatttagatcaattaacaccagctcaacaacaagcgctagaaaatcaaattaataatgcaacaactcgtggcgaagtagcacaaaaattaactgaagcacaagcacttaaccaagcaatggaagctttacgtaatagcattcaagatcaacagcaaacggaagcgggtagcaagtttatcaatgaagataaaccacaaaaagatgcttaccaagcagcagttcaaaatgcaaaagatttaattaatcaaactaacaatccaacgcttgataaagcacaagttgaacaattgacacaagctgttaaccaagctaaagataacctacacggtgatcaaaaacttgcagacgataaacaacatgcggttactgatttaaatcaattaaatggtttgaataatccgcaacgtcaagcacttgaaagccaaataaacaacgcagcaactcgtggcgaagtagcacaaaaattagctgaagcaaaagcgcttgatcaagcaatgtaa

SEQ ID NO: 7562 - protein, 8824 aa, Staphylococcus aureus
  misc_feature (2585)..(2585): Xaa can be any naturally occurring amino acid
MNYRDKIQKFSIRKYTVGTFSTVIATLVFLGFNTSQAHAAETNQPASVVKQKQQSNNEQTENRESQVQNSQNSQNGQSLSATHENEQPNISQANLVDQKVAQSSTTNDEQPASQNVNTKKDSATAATTQPDKEQSKHKQNESQSANKNGNDNRAAHVENHEANVVTASDSSDNGNVQHDRNELQAFFDANYHDYRFIDRENADSGTFNYVKGIFDKINTLLGSNDPINNKDLQLAYKELEQAVALIRTMPQRQQTSRRSNRIQTRSVESRAAEPRSVSDYQNANSSYYVENANDGSGYPVGTYINASSKGAPYNLPTTPWNTLKASDSKEIALMTAKQTGDGYQWVIKFNKGHAPHQNMIFWFALPADQVPVGRTDFVTVNSDGTNVQWSHGAGAGANKPLQQMWEYGVNDPHRSHDFKIRNRSGQVIYDWPTVHIYSLEDLSRASDYFSEAGATPATKAFGRQNFEYINGQKPAESPGVPKVYTFIGQGDASYTISFKTQGPTVNKLYYAAGGRALEYNQLFMYSQLYVESTQDHQQRLNGLRQVVNRTYRIGTTKRVEVSQGNVQTKKVLESTNLNIDDFVDDPLSYVKTPSNKVLGFYSNNANTNAFRPGGAQQLNEYQLSQLFTDQKLQEAARTRNPIRLMIGFDYPDAYGNSETLVPVNLTVLPEIQHNIKFFKNDDTQNIAEKPFSKQAGHPVFYVYAGNQGNASVNLGGSVTSIQPLRINLTSNENFTDKDWQITGIPRTLHIENSTNRPNNARERNIELVGNLLPGDYFGTIRFGRKEQLFEIRVKPHTPTITTTAEQLRGTALQKVPVNISGIPLDPSALVYLVAPTNQTTNGGSEADQIPSGYTILATGTPDGVHNTITIRPQDYVVFIPPVGKQIRAVVYYNKVVASNMSNAVTILPDDIPPTINNPVGINAKYYRGDEVNFTMGVSDRHSGIKNTTITTLPNGWTSNLTKADKNNGSLSITGRVSMNQAFNSDITFKVSATDNVNNTTNDSQSKHVSIHVGKISEDAHPIVLGNTEKVVVVNPTAVSNDEKQSIITAFMNKNQNIRGYLASTDPVTVDNNGNVTLHYRDGSSTTLDATNVMTYEPVVKPEYQTVNAAKTATVTIAKGQSFSIGDIKQYFTLSNGQPIPSGTFTNITSDRTIPTAQEVSQMNAGTQLYHITATNAYHKDSEDFYISLKIIDVKQPEGDQRVYRTSTYDLTTDEISKVKQAFINANRDVITLAEGDISVTNTPNGANVSTITVNINKGRLTKSFASNLANMNFLRWVNFPQDYTVTWTNAKIANRPTDGGLSWSDDHKSLIYRYDATLGTQITTNDILTMLKATTTVPGLRNNITGNEKSQAEAGGRPNFRTTGYSQSNATTDGQRQFTLNGQVIQVLDIINPSNGYGGQPVTNSNTRANHSNSTVVNVNEPAANGAGAFTIDHVVKSNSTHNASDAVYKAQLYLTPYGPKQYVEHLNQNTGNTTDAINIYFVPSDLVNPTISVGNYTNHQVFSGETFTNTITANDNFGVQSVTVPNTSQITGTVDNNHQHVSATAPNVTSATNKTINLLATDTSGNTATTSFNVTVKPLRDKYRVGTSSTAANPVRIANISNNATVSQADQTTIINSLTFTETVPNRSYARASANEITSKTVSNVSRTGNNANVTVTVTYQDGTTSTVTVPVKHVIPEIVAHSHYTVQGQDFPAGNGSSASDYFKLSNGSDIADATITWVSGQAPNKDNTRIGEDITVTAHILIDGETTPITKTATYKVVRTVPKHVFETARGVLYPGVSDMYDAKQYVKPVNNSWSTNAQHMNFQFVGTYGPNKDVVGISTRLIRVTYDNRQTEDLTILSKVKPDPPRIDANSVTYKAGLTNQEIKVNNVLNNSSVKLFKADNTPLNVTNITHGSGFSSVVTVSDALPNGGIKAKSSISMNNVTYTTQDEHGQVVTVTRNESVDSNDSATVTVTPQLQATTEGAVFIKGGDGFDFGHVERFIQNPPHGATVAWHDSPDTWKNTVGNTHKTAVVTLPNGQGTRNVEVPVKVYPVANAKAPSRDVKGQNLTNGTDAMNYITFDPNTNTNGITAAWANRQQPNNQQAGVQHLNVDVTYPGISAAKRVPVTVNVYQFEFPQTTYTTTVGGTLASGTQASGYAHMQNATGLPTDGFTYKWNRDTTGTNDANWSAMNKPNVAKVVNAKYDVIYNGHTFATSLPAKFVVKDVQPAKPTVTETAAGAITIAPGANQTVNTHAGNVTTYADKLVIKRNGNVVTTFTRRNNTSPWVKEASAATVAGIAGTNNGITVAAGTFNPADTIQVVATQGSGETVSDEQRSDDFTVVAPQPNQATTKIWQNGHIDITPNNPSGHLINPTQAMDIAYTEKVGNGAEHSKTINVVRGQNNQWTIANKPDYVTLDAQTGKVTFNANTIKPNSSITITPKAGTGHSVSSNPSTLTAPAAHTVNTTEIVKDYGSNVTAAEINNAVQVANKRTATIKNGTAMPTNLAGGSTTTIPVTVTYNDGSTEEVQESIFTKADKRELITAKNHLDDPVSTEGKKPGTITQYNNAMHNAQQQINTAKTEAQQVINNERATPQQVSDALTKVXAAQTKIDQAKALLQNKEDNSQLVTSKNNLQSSVNQVPSTAGMTQQSIDNYNAKKREAETEITAAQRVIDNGDATAQQISDEKHRVDNALTALNQAKHDLTADTHALEQAVQQLNRTGTTTGKKPASITAYNNSIRALQSDLTSAKNSANAIIQKPIRTVQEVQSALTNVNRVNERLTQAINQLVPLADNSALKTAKTKLDEEINKSVTTDGMTQSSIQAYENAKRAGQTESTNAQNVINNGDATDQQIAAEKTKVEEKYNSLKQAIAGLTPDLAPLQTAKTQLQNDIDQPTSTTGMTSASIAAFNEKLSAARTKIQEIDRVLASHPDVATIRQNVTAANAAKSALDQARNGLTVDKAPLENAKNQLQHSIDTQTSTTGMTQDSINAYNAKLTAARNKIQQINQVLAGSPTVEQINTNTSTANQAKSDLDHARQALTPDKAPLQTAKTQLEQSINQPTDTTGMTTASLNAYNQKLQAARQKLTEINQVLNGNPTVQNINDKVTEANQAKDQLNTARQGLTLDRQPALTTLHGASNLNQAQQNNFTQQINAAQNHAALETIKSNITALNTAMTKLKDSVADNNTIKSDQNYTDATPANKQAYDNAVNAAKGVIGETTNPTMDVNTVNQKAASVKSTKDALDGQQNLQRAKTEATNAITHASDLNQAQKNALTQQVNSAQNVQAVNDIKQTTQSLNTAMTGLKRGVANHNQVVQSDNYVNADTNKKNDYNNAYNHANDIINGNAQHPVITPSDVNNALSNVTSKEHALNGEAKLNAAKQEANTALGHLNNLNNAQRQNLQSQINGAHQIDAVNTIKQNATNLNSAMGNLRQAVADKDQVKRTEDYADADTAKQNAYNSAVSSAETIINQTTNPTMSVDDVNRATSAVTSNKNALNGYEKLAQSKTDAARAIDALPHLNNAQKADVKSKINAASNIAGVNTVKQQGTDLNTAMGNLQGAINDEQTTLNSQNYQDATPSKKTAYTNAVQAAKDILNKSNGQNKTKDQVTEAMNQVNSAKNNLDGTRLLDQAKQTAKQQLNNMTHLTTAQKTNLTNQINSGTTVAGVQTVQSNANTLDQAMNTLRQSIANKDATKASEDYVDANNDKQTAYNNAVAAAETIINANSNPEMNPSTITQKAEQVNSSKRALNGDENLAAAKQNAKTYLNTLTSITDAQKNNLISQITSATRVSGVDTVKQNAQHLDQAMASLQNGINNESQVKSSEKYRDADTNKQQEYDNAITAAKAILNKSTGPNTAQNAVEAALQRVNNAKDALNGDAKLIAAQNAAKQHLGTLTHITTAQRNDLTNQISQATNLAGVESVKQNANSLDGAMGNLQTAINDKSGTLASQNFLDADEQKRNAYNQAVSAAETILNKQTGPNTAKTAVEQALNNVNNAKHALNGTQNLNNAKQAAITAINGASDLNQKQKDALKAQANGAQRVSNAQDVQHNATELNTAMGTLKHAIADKTNTLASSKYVNADSTKQNAYTTKVTNAEHIISGTPTVVTTPSEVTAAANQVNSAKQELNGDERLREAKQNANTAIDALTQLNTPQKAKLKEQVGQANRLEDVQTVQTNGQALNNAMKGLRDSIANETTVKTSQNYTDASPNNQSTYNSAVSNAKGIINQTNNPTMDTSAITQATTQVNNAKNGLNGAENLRNAQNTAKQNLNTLSHLTNNQKSAISSQIDRAGHVSEVTATKNAATELNTQMGNLEQAIHDQNTVKQSVKFTDADKAKRDAYTNAVSRAEAILNKTQGANTSKQDVEAAIQNVSSAKNALNGDQNVTNAKNAAKNALNNLTSINNAQKRDLTTKIDQATTVAGVEAVSNTSTQLNTAMANLQNGINDKTNTLASENYHDADSDKKTAYTQAVTNAENILNKNSGSNLDKTAVENALSQVANAKGALNGNHNLEQAKSNANTTINGLQHLTTAQKDKLKQQVQQAQNVAGVDTVKSSANTLNGAMGTLRNSIQDNTATKNGQNYLDATERNKTNYNNAVDSANGVINATSNPNMDANAINQIATQVTSTKNALDGTHNLTQAKQTATNAIDGATNLNKAQKDALKAQVTSAQRVANVTSIQQTANELNTAMGQLQHGIDDENATKQTQKYRDAEQSKKTAYDQAVAAAKAILNKQTGSNSDKAAVDRALQQVTSTKDALNGDAKLAEAKAAAKQNLGTLNHITNAQRTDLEGQINQATTVDGVNTVKTNANTLDGAMNSLQGSINDKDATLRNQNYLDADESKRNAYTQAVTAAEGILNKQTGGNTSKADVDNALNAVTRAKAALNGADNLRNAKTSATNTIDGLPNLTQLQKDNLKHQVEQAQNVAGVNGVKDKGNTLNTAMGALRTSIQNDNTTKTSQNYLDASDSNKNNYNTAVNNANGVINATNNPNMDANAINGMANQVNTTKAALNGAQNLAQAKTNATNTINNAHDLNQKQKDALKTQVNNAQRVSDANNVQHTATELNSAMTALKAAIADKERTKASGNYVNADQEKRQAYDSKVTNAENIISGTPNATLTVNDVNSAASQVNAAKTALNGDNNLRVAKEHANNTIDGLAQLNNAQKAKLKEQVQSATTLDGVQTVKNSSQTLNTAMKGLRDSIANEATIKAGQNYTDASPNNRNEYDSAVTAAKAIINQTSNPTMEPNTITQVTSQVTTKEQALNGARNLAQAKTTAKNNLNNLTSINNAQKDALTRSIDGATTVAGVNQETAKATELNNAMHSLQNGINDETQTKQTQKYLDAEPSKKSAYDQAVNAAKAILTKASGQNVDKAAVEQALQNVNSTKTALNGDAKLNEAKAAAKQTLGTLTHINNAQRTALDNEITQATNVEGVNTVKAKAQQLDGAMGQLETSIRDKDTTLQSQNYQDADDAKRTAYSQAVNAAATILNKTAGGNTPKADVERAMQAVTQANTALNGIQNLDRAKQAANTAITNASDLNTKQKEALKAQVTSAGRVSAANGVEHTATELNTAMTALKRAIADKAETKASGNYVNADANKRQAYDEKVTAAENIVSGTPTPTLTPADVTNAATQVTNAKTQLNGNHNLEVAKQNANTAIDGLTSLNGPQKAKLKEQVGQATTLPNVQTVRDNAQTLNTAMKGLRDSIANEATIKAGQNYTDASQNKQTDYNSAVTAAKAIIGQTTSPSMNAQEINQAKDQVTAKQQALNGQENLRTAQTNAKQHLNGLSDLTDAQKDAVKRQIEGATHVNEVTQAQNNADALNTAMTNLKNGIQDQNTIKQGVNFTDADEAKRNAYTNAVTQAEQILNKAQGPNTSKDGVETALENVQRAKNELNGNQNVANAKTTAKNALNNLTSINNAQKEALKSQIEGATTVAGVNQVSTTASELNTAMSNLQNGINDEAATKAAQKYTDADREKQTAYNDAVTAAKTLLDKTAGSNDNKAAVEQALQRVNTAKTALNGDERLNEAKNTAKQQVATMSHLTDAQKANLTSQIESGTTVAGVQGIQANAGTLDQAMNQLRQSIASKDATKSSEDYQDANADLQNAYNDAVTNAEGIISATNNPEMNPDTINQKASQVNSANSALNGDEKLAAAKQTAKSDISRLTDLNNAQRTAANAEVDQAPNLAAVTAAKNKATSLNTAMGNLKHALAEKDNTKRSVNYTDADQPKQQAYDTAVTQAEAITNANGSNANETQVQAALNQLNQAKNDLNGDNKVAQAKESAKRALASYSNLNNAQSTAATSQIDNATTVAGVTAAQNTANELNTAMGQLQNGINDQNTVKQQVNFTDADQGKKDAYTNAVTNAQGILDKVHGQNMTKAQVEAALNQVTTAKNALNGDANVRQAKSDAKANLGTLTHLNNAQKQDLTSQIEGATTVNGVNGVKTKAQDLDGAMQRLQSAIANKDQTKASENYIDADPTKKTAFDNAITQAESYLNKDHGANKDKQAVEQAIQSVTSTENALNGDANLQRAKTEAIQAIDNLTHLNTPQKTALKQQVNAAQRVSGVTDLKNSATSLNNAMDQLKQAIADHDTIVASGNYTNASPDKQGAYTDAYNAAKNIVNGSPNVITNAADVTAATQRVNNAETGLNGDTNLATAKQQAKDALRQMTHLSDAQKQSITGQIDSATQVTGVQSVKDNATNLDNAMNQLRNSIANKDDVKASQPYVDADRDKQNAYNTAVTNAENIINATSQPTLDPSAVTQAANQVSTNKTALNGAQNLANKKQETTANINQLSHLNNAQKQDLNTQVTNAPNISTVNQVKTKAEQLDQAMERLINGIQDKDQVKQSVNFTDADPEKQTAYNNAVTAAENIINQANGTNANQSQVEAALSTVTTTKQALNGDRKVTDAKNNANQTLSTLDNLNNAQKGAVTGNINQAHTVAEVTQAIQTAQELNTAMGNLKNSLNDKDTTLGSQNFADADPEKKNAYNEAVHNAENILNKSTGTNVPKDQVEAAMNQVNATKAALNGTQNLEKAKQHANTAIDGLSHLTNAQKEALKQLVQQSTTVAEAQGNEQKANNVDAAMDKLRQSIADNATTKQNQNYTDASQNKKDAYNNAVTTAQGIIDQTTSPTLDPTVINQAAGQVSTTKNALNGNENLEAAKQQASQSLGSLDNLNNAQKQTVTDQINGAHTVDEANQIKQNAQNLNTAMGNLKQAIADKDATKATVNFTDADQAKQQAYNTAVTNAENIISKANGGNATQAEVEQAIKQVNAAKQALNGNANVQHAKDEATALINSSNDLNQAQKDALKQQVQNATTVAGVNNVKQTAQELNNAMTQLKQGIADKEQTKADGNFVNADPDKQNAYNQAVAKAEALISATPDVVVTPSEITAALNKVTQAKNDLNGNTNLATAKQNVQHAIDQLPNLNQAQRDEYSKQITQATLVPNVNAIQQAATTLNDAMTQLKQGIANKAQIKGSENYHDADTDKQTAYDNAVTKAEELLKQTTNPTMDPNTIQQALTKVNDTNQALNGNQKLADAKQDAKTTLGTLDHLNDAQKQALTTQVEQAPDIATVNNVKQNAQNLNNAMTNLNNALQDKTETLNSINFTDADQAKKDAYTNAVSHAEGILSKANGSNASQTEVEQAMQRVNEAKQALNGNDNVQRAKDAAKQVITNANDLNQAQKDALKQQVDAAQTVANVNTIKQTAQDLNQAMTQLKQGIADKDQTKANGNFVNADTDKQNAYNNAVAHAEQIISGTPNANVDPQQVAQALQQVNQAKGDLNGNHNLQVAKDNANTAIDQLPNLNQPQKTALKDQVSHAELVTGVNAIKQNADALNNAMGTLKQQIQANSQVPQSVDFTQADQDKQQAYNNAANQAQQIANGIPTPVLTPDTVTQAVTTMNQAKDALNGDEKLAQAKQEALANLDTLRDLNQPQRDALRNQINQAQALATVEQTKQNAQNVNTAMSNLKQGIANKDTVKASENYHDADADKQTAYTNAVSQAEGIINQTTNPTLNPDEITRALTQVTDAKNGLNGEAKLATEKQNAKDAVSGMTHLNDAQKQALKGQIDQSPEIATVNQVKQTATSLDQAMDQLSQAINDKAQTLADGNYLNADPDKQNAYKQAVAKAEALLNKQSGTNEVQAQVESITNEVNAAKQALNGNDNLANAKQQAKQQLANLTHLNDAQKQSFESQITQAPLVTDVTTINQKAQTLDHAMELLRNSVADNQTTLASEDYHDATAQRQNDYNQAVTAANNIINQTTSPTMNPDDVNGATTQVNNTKVALDGDENLAAAKQQANNRLDQLDHLNNAQKQQLQSQITQSSDIAAVNGHKQTAESLNTAMGNLINAIADHQAVEQRGNFINADTDKQTAYNTAVNEAAAMINKQTGQNANQTEVEQAITKVQTTLQALNGDHNLQVAKTNATQAIDALTSLNDPQKTALKDQVTAATLVTAVHQIEQNANTLNQAMHGLRQSIQDNAATKANSKYINEDQPEQQNYDQAVQAANNIINEQTATLDNNAINQAATTVNTTKAALHGDVKLQNDKDHAKQTVSQLAHLNNAQKHMEDTLIDSETTRTAVKQDLTEAQALDQLMDALQQSIADKDATRASSAYVNAEPNKKQSYDEAVQNAESIIAGLNNPTINKGNVSSATQAVISSKNALDGVERLAQDKQTAGNSLNHLDQLTPAQQQALENQINNATTRGEVAQKLTEAQALNQAMEALRNSIQDQQQTEAGSKFINEDKPQKDAYQAAVQNAKDLINQTNNPTLDKAQVEQLTQAVNQAKDNLHGDQKLADDKQHAVTDLNQLNGLNNPQRQALESQINNAATRGEVAQKLAEAKALDQAM

SEQ ID NO: 7563 - DNA, 510 bp, Staphylococcus aureus
  misc_feature (311)..(311): n is a, c, g or t
atgatccgtctaggtaaaatgtcagatttagatcaaatcttaaatctagtagaagaagcaaaagaattaatgaaagaacacgacaacgagcaatgggacgatcagtacccacttttagaacattttgaagaagatattgctaaagattatttgtacgtattagaggaaaatgacaaaatttatggctttattgttgtcgaccaagaccaagcagaatggtatgatgacattgactggccagtaaatagagaaggcgcctttgttattcatcgattaactggttcgaaagaatataaaggagctgctacagnattattcaattatgttattgatgtagttaaagcacgtggtgcagaagttattttaacggacacctttgcgttaaacaaacctgcacaaggtttatttgccaaatttggatttcataaggtcggtgaacaattaatggaatatccgccatatgataaaggtgaaccattttatgcatattataaaaatttaaaagaatag

SEQ ID NO: 7564 - protein, 169 aa, Staphylococcus aureus
  misc_feature (104)..(104): Xaa can be any naturally occurring amino acid
MIRLGKMSDLDQILNLVEEAKELMKEHDNEQWDDQYPLLEHFEEDIAKDYLYVLEENDKIYGFIVVDQDQAEWYDDIDWPVNREGAFVIHRLTGSKEYKGAATXLFNYVIDVVKARGAEVILTDTFALNKPAQGLFAKFGFHKVGEQLMEYPPYDKGEPFYAYYKNLKE

SEQ ID NO: 7565 - DNA, 1224 bp, Staphylococcus aureus
  misc_feature (749)..(749): n is a, c, g or t
atgaagtatgatcacttgcttgttagatacggggagttaacattaaagggttcaaatagaaagaaatttgtaaatcaattaagaaataatgtaaataagtcattaaaaggacttgatgggtttgtcgttaaaggcaaacgagatcgtatgtatattgaacttgaagaccatgcagatataaatgaaataacatatcgattatcaaaaattttcggtattaaatctattagtccagtattaaaagtagaaaaaacaatagaggcaataagtgcagcggcaattaaatttgcgcagcaatttgaagaaaacagcacatttaaaattgatgtgaagcgtgccgataaaaatttcccaatggatacgtatgaattacagcgtgaattgggtggtgcagtattgaagcacttcgacaatatttcagtgaatgtcaaacgtccagatcatgaaattcgagtggaagttagattagatgcaatttatatgtatgaagaagttgttccgggttcaggtggattaccagttggtactggtggtaagacgttactaatgctttcaggcggtatagactcaccagttgctgggatggaagtgatgagacgtggcgtaacaattgaagcgattcatttccatagtccaccatttacaagtgatcaagcaaaagaaaaagttattgaattgacacgtattttagctgaacgtgttggaccaattaaattgcatattgtaccatttacagaattgcaaaaacnggtaaataaagttgtacatccaagatatacaatgacttcaacgagacgtatgatgatgcgtgttgctgataaattagtacatcaaataggggctttagctattgtaaatggtgaaaacctagggcaggtagccagtcaaacacttcatagcatgtatgcaattaataatgtaacttctactcctgtattacgtcctttattaacttacgataaagaagaaattattattaaatcgaaagaaattggtacatttgaaacatctattcaaccatttgaagattgttgtacaattttcacccctaaaaatccagtaaccgaaccaaactttgataaggtagtccaatatgaaagtgtctttgattttgaagagatgattaatcgtgctgttgaaaatattgaaacacttgaaataactagtgattataaaactattaaagaacagcaaacaaaccaattaataaacgactttttataa

SEQ ID NO: 7566 - protein, 407 aa, Staphylococcus aureus
  misc_feature (250)..(250): Xaa can be any naturally occurring amino acid
MKYDHLLVRYGELTLKGSNRKKFVNQLRNNVNKSLKGLDGFVVKGKRDRMYIELEDHADINEITYRLSKIFGIKSISPVLKVEKTIEAISAAAIKFAQQFEENSTFKIDVKRADKNFPMDTYELQRELGGAVLKHFDNISVNVKRPDHEIRVEVRLDAIYMYEEVVPGSGGLPVGTGGKTLLMLSGGIDSPVAGMEVMRRGVTIEAIHFHSPPFTSDQAKEKVIELTRILAERVGPIKLHIVPFTELQKXVNKVVHPRYTMTSTRRMMMRVADKLVHQIGALAIVNGENLGQVASQTLHSMYAINNVTSTPVLRPLLTYDKEEIIIKSKEIGTFETSIQPFEDCCTIFTPKNPVTEPNFDKVVQYESVFDFEEMINRAVENIETLEITSDYKTIKEQQTNQLINDFL

SEQ ID NO: 7567 - DNA, 771 bp, Staphylococcus aureus
  misc_feature (581)..(581): n is a, c, g or t
atggatttgaacttaacgatgattataatcataattttatttggttttatcgcggcgtttatagattcggttgtagggggtggcggtttaatttctacgccagcattattagcaatcggtctaccaccatctgtggctttaggtacaaataaattggcaagttcgtttggttctttaactagtacgataaagtttataaggtccggtaaagtggacttatatgttgttgccaaattatttggttttgtatttttggcatctgcatgtggcgcatatattgcaacgatggttccgtcacaaatattgaaacctttaatcatcattgcactttcgtcggtgtttatattcacattacttaaaaaagattggggcaatacacgcacgtttactcaatttacatttaagaaagccataatatttgcagcactttttatattaatcggcttttatgatggatttgtaggtgggggaacaggttcatttatgctttttgtattgttagtctttggttttgattttttaagtgcagcaggaaatgctaaagttttgaactttgcttctaatataggtgcgcttgtatnatttatggtattaggacaagtagattatgtaataggtttaattatggctataagtatgattgctgggtcatatgctggggctcattttgctattaaacaaggtgttggttatgtaaaagtattatttattattattactgctattttaattttaaaaaatgcttttgattatattcaacaatttgtataa

SEQ ID NO: 7568 - protein, 256 aa, Staphylococcus aureus
  misc_feature (194)..(194): Xaa can be any naturally occurring amino acid
MDLNLTMIIIIILFGFIAAFIDSVVGGGGLISTPALLAIGLPPSVALGTNKLASSFGSLTSTIKFIRSGKVDLYVVAKLFGFVFLASACGAYIATMVPSQILKPLIIIALSSVFIFTLLKKDWGNTRTFTQFTFKKAIIFAALFILIGFYDGFVGGGTGSFMLFVLLVFGFDFLSAAGNAKVLNFASNIGALVXFMVLGQVDYVIGLIMAISMIAGSYAGAHFAIKQGVGYVKVLFIIITAILILKNAFDYIQQFV

SEQ ID NO: 7569 - DNA, 1203 bp, Staphylococcus aureus
  misc_feature (595)..(595): n is a, c, g or t
atggctaaaattccagttacggtattaagtggttatttaggctcggggaagacaacgttgttaaatcatattttacaaaatcgagaaggtcgacgtatcgcggtaattgtaaatgatatgagtgaagtaaatatcgataaagatcttgtcgcagatggtgggggactatcgcgtacagatgaaaaattagtcgaactttctaatggttgtatctgttgtacacttagagacgatttattaaaagaagttgagcgtttagtgaaaaaaggtggcatcgatcaaattgttattgagtcaacagggatttcagagccagtacctgttgcacaaactttctcatatattgatgatgaacttggcattgatcttacagcgatttgccgtttagatacaatggttacagttgtggatgctaaccgcttcgtacatgacatcaactcagaagatttattgatggatcgtgatcaaagcgttgacgaaacagatgagcgttcgattgctgatttattaattgaccaagttgaattttgtgatgtattgattattaataaaattgatttaattagtgaagaagaactagcgaagttagaaaaantgttaagcgcattgcaaccgactgctaaaattattaagacaacaaattctgaagtagatttaaaagaagtcttgaatacgcagcgttttgattttgaaaaagcgagcgagtcagcaggatggatcaaagaacttgagtctggtgggcatgcatcgcatacacctgaaacagaagaatatggtatatcatcgtttgtatataaacgtcgtctacctttccatgctaaaaggttcaatgattggttagaaagcatgccaaataatgtcgttcgatcaaaaggtatcgtatggctagcacaatacaatcacgtagcatgtttattatctcaagcagggtcatcttgcaatattcatccagttacatattgggtggctagtatgtctgaagcgcaacaaacacaaatattagcagaacgtcaagatgtcgcagctgaatgggatccagaatatggcgatcgtcatacacaatttgtcattattggtacagaattagatgaagaaaaattaacaaaagaactcgacgcatgcttagtcaatgcgcaagaaattgatgcagattggcaacaatttgaagatccatatcaatggcaaattagaccagcacgataa

SEQ ID NO: 7570 - protein, 400 aa, Staphylococcus aureus
  misc_feature (199)..(199): Xaa can be any naturally occurring amino acid
MAKIPVTVLSGYLGSGKTTLLNHILQNREGRRIAVIVNDMSEVNIDKDLVADGGGLSRTDEKLVELSNGCICCTLRDDLLKEVERLVKKGGIDQIVIESTGISEPVPVAQTFSYIDDELGIDLTAICRLDTMVTVVDANRFVHDINSEDLLMDRDQSVDETDERSIADLLIDQVEFCDVLIINKIDLISEEELAKLEKXLSALQPTAKIIKTTNSEVDLKEVLNTQRFDFEKASESAGWIKELESGGHASHTPETEEYGISSFVYKRRLPFHAKRFNDWLESMPNNVVRSKGIVWLAQYNHVACLLSQAGSSCNIHPVTYWVASMSEAQQTQILAERQDVAAEWDPEYGDRHTQFVIIGTELDEEKLTKELDACLVNAQEIDADWQQFEDPYQWQIRPAR

SEQ ID NO: 7571 - DNA, 843 bp, Staphylococcus aureus
  misc_feature (58)..(58): n is a, c, g or t
atgaaaagattgattgggttagttatcgtagcacttgtattattagcagcgtgtggtngtaacaatgataaaaaagtaacaattggtgtcgcatcaaatgacactaaggcttgggagaaggttaaagaattagctaaaaaagatgatattgatgtggagattaagcacttctcagattacaatttaccgaataaagcattaaatgatggtgatattgatatgaatgcattccaacattttgcatttttagatcaatataaaaaggcgcataaaggaacaaagatttcagcattaagtacaacagttttagcaccgttgggcatttactcagataaaattaaagatgtcaaaaaggttaaagatggtgctaaagttgtcattccaaatgatgtgtcaaaccaagcacgtgcacttaaactattagaagcagctggtttaataaaactgaaaaaagatttcggattagcaggcacggtgaaagatataacgtcaaatccaaaacatttaaaaattactgcagtagatgcacaacaaactgcacgtgctttatctgatgtcgatattgcagttattaataacggtgtagcaactaaagcgggtaaagatcctaaaaatgatccgatatttttagaaaaatcaaattcagatgcagtaaagccatatattaatattgttgcagttaatgacaaagacttggataacaaaacatatgctaaaatcgtagaattgtatcattcaaaagaagctcaaaaagcgttgcaggaagatgtcaaagatggagagaaacctgttaatttatctaaagatgagattaaggcaatagaaacgtcattagcaaaataa

SEQ ID NO: 7572 - protein, 280 aa, Staphylococcus aureus
  misc_feature (20)..(20): Xaa can be any naturally occurring amino acid
MKRLIGLVIVALVLLAACGXNNDKKVTIGVASNDTKAWEKVKELAKKDDIDVEIKHFSDYNLPNKALNDGDIDMNAFQHFAFLDQYKKAHKGTKISALSTTVLAPLGIYSDKIKDVKKVKDGAKVVIPNDVSNQARALKLLEAAGLIKLKKDFGLAGTVKDITSNPKHLKITAVDAQQTARALSDVDIAVINNGVATKAGKDPKNDPIFLEKSNSDAVKPYINIVAVNDKDLDNKTYAKIVELYHSKEAQKALQEDVKDGEKPVNLSKDEIKAIETSLAK

SEQ ID NO: 7573 - DNA, 1440 bp, Staphylococcus aureus
  misc_feature (145)..(145): n is a, c, g or t
atggcgcaaaagaataataatgtaattccaatgacttttgatgatgcattttatcgtaaaatggctaaacagaagtttaaacaaagagaatataaacgagctgctgaatactttgaaaaagtgttagaattgtcacctgatgatntggaaattcaaattgattatgcacaatgtctagtgcaacttggtattgctaaaaaagcagaacatttattttatgacaatattatttataataggcatctagaagatagcttttatgaattgagtcagctcaacattgaagttaacgaaccaaacaaggcattcttgtttggtattaattatgttattgttagcgacgaccaagattatagagatgaattagatcaaatgtttgatgtgaaatatcaaagtgaagaacaaattgaacttgaagctcaattgtttgtagttcaaatactattccaatatcttttttctcaaggtcgattaaaagatgcaaagaattatgtcttacatcaaccacaagaagttcaagatcatcgtgtagtacgtaatttattggcaatgtgttatttatatctcggtgaatatgatacggctaaagcattgtacgaagcactattacaagaggatagtacagatatatatgcattatgccattatactttgctactttataacactaaggaaaatgaacaatatcaaaaatatttaaaaatattaaacaaagttgtacctatgaatgacgatgaaagttttaaattaggtattgtattaagttatttaaagcagtatcgtgcatcacaacaattgttgtaccctttatataaaaaagggaaatttttatcaattcaaatgtacaatgctttagcatataattattattatttaggtgaagaagacgaaagtcattactactgggataaattgaagcaaatttctaaagtggaaattggacatgcgccttgggtaattgaaaatagcaaagaagtttttgaccaacatattttgccattacttcaaagtgatgacagtcattatcgtttatatggtatttttttattggatcaattaaatggtaaagaaattgtgatgacggaaagtatttggcaggttttggaaaatctaaataattatgagaaattgtatttaacgtatttagttcaaggtttaacgctcaataaattagacttcattcatcgcggcttattaacgctttaccataatgaattatttgtaagtgaaaatgatgtaatggttgcatggattaatcaaggtgaactcataattgctgaaaaagtagatttaactgatgttgagccatatatcggtgcgtttatttatttgtattttaaaaatcaacctcgaaacgttacaaagaagcaaattacaacatggttaggcataacacaatataaactgaacaaaatgattgaatttctcttgagcatatag

SEQ ID NO: 7574 - protein, 479 aa, Staphylococcus aureus
  misc_feature (49)..(49): Xaa can be any naturally occurring amino acid
MAQKNNNVIPMTFDDAFYRKMAKQKFKQREYKRAAEYFEKVLELSPDDXEIQIDYAQCLVQLGIAKKAEHLFYDNIIYNRHLEDSFYELSQLNIEVNEPNKAFLFGINYVIVSDDQDYRDELDQMFDVKYQSEEQIELEAQLFVVQILFQYLFSQGRLKDAKNYVLHQPQEVQDHRVVRNLLAMCYLYLGEYDTAKALYEALLQEDSTDIYALCHYTLLLYNTKENEQYQKYLKILNKVVPMNDDESFKLGIVLSYLKQYRASQQLLYPLYKKGKFLSIQMYNALAYNYYYLGEEDESHYYWDKLKQISKVEIGHAPWVIENSKEVFDQHILPLLQSDDSHYRLYGIFLLDQLNGKEIVMTESIWQVLENLNNYEKLYLTYLVQGLTLNKLDFIHRGLLTLYHNELFVSENDVMVAWINQGELIIAEKVDLTDVEPYIGAFIYLYFKNQPRNVTKKQITTWLGITQYKLNKMIEFLLSI

SEQ ID NO: 7575 - DNA, 762 bp, Staphylococcus aureus
  misc_feature (548)..(548): n is a, c, g or t
atgagaacaccaattatagctggtaactggaaaatgaacaaaacagtacaagaagcaaaagacttcgtcaatgcattaccaacattaccagattcaaaagaagtagaatcagtaatttgtgcaccagcaattcaattagatgcattaactactgcagttaaagaaggaaaagcacaaggtttagaaatcggtgctcaaaatacgtatttcgaagataatggtgcgttcacaggtgaaacgtctccagttgcattagcagatttaggcgttaaatacgttgttatcggtcattctgaacgtcgtgaattattccacgaaacagatgaagaaattaacaaaaaagcgcacgctattttcaaacatggaatgactccaattatatgtgttggtgaaacagacgaagagcgtgaaagtggtaaagctaacgatgttgtaggtgagcaagttaagaaagctgttgcaggtttatctgaagatcaacttaaatcagttgtaattgcttatgaaccaatctgggcaatcggaactggtaaatcatcaacatctgnagatgcaaatgaaatgtgtgcatttgtacgtcaaactattgctgacttatcaagcaaagaagtatcagaagcaactcgtattcaatatggtggtagtgttaaacctaacaacattaaagaatacatggcacaaactgatattgatggggcattagtaggtggcgcatcacttaaagttgaagatttcgtacaattgttagaaggtgcaaaataa

SEQ ID NO: 7576 - protein, 253 aa, Staphylococcus aureus
  misc_feature (183)..(183): Xaa can be any naturally occurring amino acid
MRTPIIAGNWKMNKTVQEAKDFVNALPTLPDSKEVESVICAPAIQLDALTTAVKEGKAQGLEIGAQNTYFEDNGAFTGETSPVALADLGVKYVVIGHSERRELFHETDEEINKKAHAIFKHGMTPIICVGETDEERESGKANDVVGEQVKKAVAGLSEDQLKSVVIAYEPIWAIGTGKSSTSXDANEMCAFVRQTIADLSSKEVSEATRIQYGGSVKPNNIKEYMAQTDIDGALVGGASLKVEDFVQLLEGAK

SEQ ID NO: 7577 - DNA, 1455 bp, Staphylococcus aureus
  misc_feature (661)..(661): n is a, c, g or t
atggaagataataaaatgaaccgtagtcttaactcaagacacatttccatgattgctataggtggtgcaattgggactggtctatttgtagctactggtaatatcatttctcaagctggtcctggaggcgctatactcgcttatcttgttattggtgtcatgctatatttcttaatgtcatcaattggagagttggcaacattttatccagtatcaggttcattcagctcttattcaacacgctttattgactcatctcttggctttaccatgggatggttgtattgggcattgtggtcattagttacaagtgttgatgtcatagtagcgtcaaatgtgctttatttctgggacacatttaaatttttccaccccattacttggagcttaatctttattacaattttactattattaaacattttttctgtaaaatcatttggagaaactgagttttggttatcattgattaaagtgttaacaattatcgtattcgttatttttggctttttaatgattttcggtatcttaggtggtcatacatatggatttgaaaactatacaaaaggccaagcaccgtttgttggtggtatctctggtttcttaggcgtattattagtcgccggattttcggttggtggtacagaagtagtagcagtanctgctggtgaatcagatgaccctaaaaagtctatgcctaaggcaattaaacaagtattttggcgtattcttttattctatgtcttatcaattgcagtaattggtgcaattattccgtacacagatccatcattattaagagcaagtagttcaataagtcaaagcccatttacaattgtattcgatagagtaggcatagcctttgcagcatcagtaatcaacgcggttattttaacttcattattatccgctgcaaattcaggtgtttatacaacaggcagaatgttgtattccttaagttcagacaaaaaagcaccccaatttttaagtaaattaaacaagacaactaagttacctttaagagcattattaactacttatgcagtcgttgttattgttattatttatgcaaactttaattcaaatgccgtttttaatttacttgaaattattggttcaatgattatagttgtttggggatcaagcatttggtcacaaatacgattgcgacaagctattaaaaaacaaggtcaagaccctaataaggtcctaccatataaagcacctttttatccattaggaccaatcattgtcatcactacactattattcttgctatttggtggctcagttgaatatattttaaaagatcaatggttaaatgcttttaaaaactttttacctttaatcattctagcgttgatttactttattcataaaatcattcacaaaacaaaatttgtaaagctagaaacaattaatttaaaaccacacgattatgacaatcaaaaataa

SEQ ID NO: 7578 - protein, 484 aa, Staphylococcus aureus
  misc_feature (221)..(221): Xaa can be any naturally occurring amino acid
MEDNKMNRSLNSRHISMIAIGGAIGTGLFVATGNIISQAGPGGAILAYLVIGVMLYFLMSSIGELATFYPVSGSFSSYSTRFIDSSLGFTMGWLYWALWSLVTSVDVIVASNVLYFWDTFKFFHPITWSLIFITILLLLNIFSVKSFGETEFWLSLIKVLTIIVFVIFGFLMIFGILGGHTYGFENYTKGQAPFVGGISGFLGVLLVAGFSVGGTEVVAVXAGESDDPKKSMPKAIKQVFWRILLFYVLSIAVIGAIIPYTDPSLLRASSSISQSPFTIVFDRVGIAFAASVINAVILTSLLSAANSGVYTTGRMLYSLSSDKKAPQFLSKLNKTTKLPLRALLTTYAVVVIVIIYANFNSNAVFNLLEIIGSMIIVVWGSSIWSQIRLRQAIKKQGQDPNKVLPYKAPFYPLGPIIVITTLLFLLFGGSVEYILKDQWLNAFKNFLPLIILALIYFIHKIIHKTKFVKLETINLKPHDYDNQK

SEQ ID NO: 7579 - DNA, 3786 bp, Staphylococcus aureus
  misc_feature (1549)..(1549): n is a, c, g or t
gtgatacatgttttagattttaacgacaagattatagatttcctttctactgatgacccttccttagttagagcgattcataaacgtaatgttaatgacaattcagaaatgcttgaactgctcatatcatcagaaagagctgaaaagttccgtgaacgacatcgtgttattataagggattcaaacaaacaatggcgtgaatttattattaactgggttcaagatacgatggacggctacacagagatagaatgtatagcgtcttatcttgctgatataacaacagctaaaccgtatgcaccaggaaaatttgagaaaaagacaacttcagaagcattgaaagatgtgttgagcgatacaggttgggaagtttctgaacaaaccgaatacgatggcttacgtactacgtcatggacttcttatcaaactagatatgaagttttaaagcaattatgtacaacctataaaatggttttagatttttatattgagcttagctctaataccgtcaaaggtagatatgtagtactcaaaaagaaaaacagcttattcaaaggtaaagaaattgaatatggtaaagatttagtcgggttaactaggaagattgatatgtcagaaatcaaaacagcattaattgctgtgggatctgaaaatgacaaagggaagcgtttagagctagttgtgacagatgacgaagcgcaaagtcaattcaacctacctatgcgctatatttgggggatatatgaaccacaatcagatgatcaaaatatgaatgaaacacgattaagttctttagccaaaacagagttaaataaacgtaagtcggcagttatgtcatatgagattacttctactgatttggaagttacgtatccgcacgagattatatcaattggcgatacagtcagagtaaaacatagagattttaacccgccattgtatgtagaggcagaagttattgctgaagaatataacataatttcagaaaatagcacatatacattcggtcaacctaaagagttcaaagaatcagaattacgagaagagtttaacaagcgattaaacctaatacaccaaaaattaaacgacaatattagcaatatcaatactatagtaaaagatgttgtagatggtgaattagaatactttgaacgcaaaattcataaaagtgatacaccgccagaaaatccagtcaatgatacgctttggtatgatacaagtaaccctgatgttgctgtcttgcgtagatattggaatggtcgatggattgaagcaacaccaaatgatgttgaaaaattaggtggtataacaagagagaaagcgctattcagtgaattaaacaatatttttattaatttatctatacaacacgctagtcttttgtcagaagctacagaattactgaatagcgagtacttagtagataatgatttgaaagcggacttacaagcaagtttagacgctgtgattgatgtttataatcaaattaaaaataatttagaatctatgacacccgaaactgcaacgattggtcggttggtagatacanaaactttatttcttgagtatagaaagaaattacaagatgtttatacagatgtagaagatgtcaaaatcgccatttcagatagatttaaattattacagtcacaatacactgatgaaaaatataaagaagcgttggaaataatagcaacaaaatttggtttaacggtgaatgaagatttgcagttagtcggagaacctaatgttgttaaatcagctattgaagcagctagagaatccacaaaagaacaattacgtgactatgtaaaaacatcggactataaaacagacaaagacggtattgttgaacgtttagatactgctgaagctgagagaacgactttaaaaggtgaaatcaaagataaagttacgttaaacgaatatcaaaacggattggaagaacaaaaacaatatactgatgaccagttaagtgatttgtccaataatcctgagattaaagcaagtattgaacaagcaaatcaagaagcgcaagaagctttaaaatcatacattgatgctcaagataatcttaaagagaaggaatcgcaagcgtatgctgatggtaaaatttcggaagaagagcaacgcgctatacaagatgctcaagctaaacttgaagaggcaaaacaaaacgcagaactaaaggctagaaacgctgaaaagaaagctaatgcttatacagacaacaaggtcaaagaaagcacagatgcacagaggagaacactgactcgctatggttctcaaattatacaaaatggtaaggaaatcaaattaagaactactaaagaagagtttaatgcaaccaatcgtacactttcaaatatattaaacgagattgtccaaaacgttacagatggaacaacaatcagatatgatgataacggagtggctcaagctttaaatgtggggccacgtggtattagattaaatgctgataaaattgatattaacggtaatagagaaataaaccttcttatccaaaatatgcgagataaagtagataaaaccgatattgtcaacagccttaatttatcaagagagggtcttgatatcaatgttaatagaattggaattaaaggcggtaacaataacagatatgttcaaatacagaatgattctattgaactaggtggtattgtgcaacgaacttggaaaggcaaacgatcaaccgatgatatattcacacgtcttaaagatggacatctaaggtttagaaataataccgcaggcggttcactttatatgtcacattttggtatttcaacatatattgatggagaaggcgaagacggaggttcatccggtactattcaatggtgggataaaacttacagtgatagcggtatgaatggcataacaatcaattcctatggtggtgtcgttgcactaacgtcagataataatcgggttgttctggagtcttacgcttcatcgaatatcaaaagcaaacaggcaccggtgtatttatatccaaacacagacaaagtgcctggattaaaccgatttgcattcacgctgtctaatgcagataatgcttattcgagtgacggttatattatgtttggttctgatgagaactatgattacggtgcgggtatcaggttttctaaagaaagaaataaaggtcttgttcaaattgttaatggacgatatgcaacaggtggagatacaacaatcgaagcagggtatggcaaatttaatatgctgaaacgacgtgatggtaataggtatattcatatacagagtacagacctactgtctgtaggttcagatgatgcaggagataggatagcttctaactcaatttatagacgtacttattcggccgcagctaatttgcatattacttctgctggcacaattgggcgttcgacatcagcgcgtaaatacaagttatctatcgaaaatcaatataacgatagagatgaacaactggaacattcaaaagctattcttaacttacctattagaacgtggtttgataaagctgagtctgaaattttagctagagagctgagagaagatagaaaattatcggaagacacctataaacttgatagatacgtaggtttgattgctgaagaggtggagaatttaggattaaaagagtttgtcacgtatgatgacaaaggagaaattgaaggtatagcgtatgatcgtctatggattcatcttatccctgttatcaaagaacaacaactaagaatcaagaaattggaggagtcaaagaatgcaggataa

SEQ ID NO: 7580 - protein, 1261 aa, Staphylococcus aureus
  misc_feature (517)..(517): Xaa can be any naturally occurring amino acid
MIHVLDFNDKIIDFLSTDDPSLVRAIHKRNVNDNSEMLELLISSERAEKFRERHRVIIRDSNKQWREFIINWVQDTMDGYTEIECIASYLADITTAKPYAPGKFEKKTTSEALKDVLSDTGWEVSEQTEYDGLRTTSWTSYQTRYEVLKQLCTTYKMVLDFYIELSSNTVKGRYVVLKKKNSLFKGKEIEYGKDLVGLTRKIDMSEIKTALIAVGSENDKGKRLELVVTDDEAQSQFNLPMRYIWGIYEPQSDDQNMNETRLSSLAKTELNKRKSAVMSYEITSTDLEVTYPHEIISIGDTVRVKHRDFNPPLYVEAEVIAEEYNIISENSTYTFGQPKEFKESELREEFNKRLNLIHQKLNDNISNINTIVKDVVDGELEYFERKIHKSDTPPENPVNDTLWYDTSNPDVAVLRRYWNGRWIEATPNDVEKLGGITREKALFSELNNIFINLSIQHASLLSEATELLNSEYLVDNDLKADLQASLDAVIDVYNQIKNNLESMTPETATIGRLVDTXTLFLEYRKKLQDVYTDVEDVKIAISDRFKLLQSQYTDEKYKEALEIIATKFGLTVNEDLQLVGEPNVVKSAIEAARESTKEQLRDYVKTSDYKTDKDGIVERLDTAEAERTTLKGEIKDKVTLNEYQNGLEEQKQYTDDQLSDLSNNPEIKASIEQANQEAQEALKSYIDAQDNLKEKESQAYADGKISEEEQRAIQDAQAKLEEAKQNAELKARNAEKKANAYTDNKVKESTDAQRRTLTRYGSQIIQNGKEIKLRTTKEEFNATNRTLSNILNEIVQNVTDGTTIRYDDNGVAQALNVGPRGIRLNADKIDINGNREINLLIQNMRDKVDKTDIVNSLNLSREGLDINVNRIGIKGGNNNRYVQIQNDSIELGGIVQRTWKGKRSTDDIFTRLKDGHLRFRNNTAGGSLYMSHFGISTYIDGEGEDGGSSGTIQWWDKTYSDSGMNGITINSYGGVVALTSDNNRVVLESYASSNIKSKQAPVYLYPNTDKVPGLNRFAFTLSNADNAYSSDGYIMFGSDENYDYGAGIRFSKERNKGLVQIVNGRYATGGDTTIEAGYGKFNMLKRRDGNRYIHIQSTDLLSVGSDDAGDRIASNSIYRRTYSAAANLHITSAGTIGRSTSARKYKLSIENQYNDRDEQLEHSKAILNLPIRTWFDKAESEILARELREDRKLSEDTYKLDRYVGLIAEEVENLGLKEFVTYDDKGEIEGIAYDRLWIHLIPVIKEQQLRIKKLEESKNAG

SEQ ID NO: 7581 - DNA, 3786 bp, Staphylococcus aureus
  misc_feature (1931)..(1931): n is a, c, g or t
gtgatacatgttttagattttaacgacaagattatagatttcctttctactgatgacccttccttagttagagcgattcataaacgtaatgttaatgacaattcagaaatgcttgaactgctcatatcatcagaaagagctgaaaagttccgtgaacgacatcgtgttattataagggattcaaacaaacaatggcgtgaatttattattaactgggttcaagatacgatggacggctacacagagatagaatgtatagcgtcttatcttgctgatataacaacagctaaaccgtatgcaccaggaaaatttgagaaaaagacaacttcagaagcattgaaagatgtgttgagcgatacaggttgggaagtttctgaacaaaccgaatacgatggcttacgtactacgtcatggacttcttatcaaactagatatgaagttttaaagcaattatgtacaacctataaaatggttttagatttttatattgagcttagctctaataccgtcaaaggtagatatgtagtactcaaaaagaaaaacagcttattcaaaggtaaagaaattgaatatggtaaagatttagtcgggttaactaggaagattgatatgtcagaaatcaaaacagcattaattgctgtgggatctgaaaatgacaaagggaagcgtttagagctagttgtgacagatgacgaagcgcaaagtcaattcaacctacctatgcgctatatttgggggatatatgaaccacaatcagatgatcaaaatatgaatgaaacacgattaagttctttagccaaaacagagttaaataaacgtaagtcggcagttatgtcatatgagattacttctactgatttggaagttacgtatccgcacgagattatatcaattggcgatacagtcagagtaaaacatagagattttaacccgccattgtatgtagaggcagaagttattgctgaagaatataacataatttcagaaaatagcacatatacattcggtcaacctaaagagttcaaagaatcagaattacgagaagagtttaacaagcgattaaacctaatacaccaaaaattaaacgacaatattagcaatatcaatactatagtaaaagatgttgtagatggtgaattagaatactttgaacgcaaaattcataaaagtgatacaccgccagaaaatccagtcaatgatacgctttggtatgatacaagtaaccctgatgttgctgtcttgcgtagatattggaatggtcgatggattgaagcaacaccaaatgatgttgaaaaattaggtggtataacaagagagaaagcgctattcagtgaattaaacaatatttttattaatttatctatacaacacgctagtcttttgtcagaagctacagaattactgaatagcgagtacttagtagataatgatttgaaagcggacttacaagcaagtttagacgctgtgattgatgtttataatcaaattaaaaataatttagaatctatgacacccgaaactgcaacgattggtcggttggtagatacaaaaactttatttcttgagtatagaaagaaattacaagatgtttatacagatgtagaagatgtcaaaatcgccatttcagatagatttaaattattacagtcacaatacactgatgaaaaatataaagaagcgttggaaataatagcaacaaaatttggtttaacggtgaatgaagatttgcagttagtcggagaacctaatgttgttaaatcagctattgaagcagctagagaatccacaaaagaacaattacgtgactatgtaaaaacatcggactataaaacagacaaagacggtattgttgaacgtttagatactgctgaagctgagagaacgactttaaaaggtgaaatcaaagataaagttacgttaaacgaatatcnaaacggattggaagaacaaaaacaatatactgatgaccagttaagtgatttgtccaataatcctgagattaaagcaagtattgaacaagcaaatcaagaagcgcaagaagctttaaaatcatacattgatgctcaagataatcttaaagagaaggaatcgcaagcgtatgctgatggtaaaatttcggaagaagagcaacgcgctatacaagatgctcaagctaaacttgaagaggcaaaacaaaacgcagaactaaaggctagaaacgctgaaaagaaagctaatgcttatacagacaacaaggtcaaagaaagcacagatgcacagaggagaacactgactcgctatggttctcaaattatacaaaatggtaaggaaatcaaattaagaactactaaagaagagtttaatgcaaccaatcgtacactttcaaatatattaaacgagattgtccaaaacgttacagatggaacaacaatcagatatgatgataacggagtggctcaagctttaaatgtggggccacgtggtattagattaaatgctgataaaattgatattaacggtaatagagaaataaaccttcttatccaaaatatgcgagataaagtagataaaaccgatattgtcaacagccttaatttatcaagagagggtcttgatatcaatgttaatagaattggaattaaaggcggtaacaataacagatatgttcaaatacagaatgattctattgaactaggtggtattgtgcaacgaacttggaaaggcaaacgatcaaccgatgatatattcacacgtcttaaagatggacatctaaggtttagaaataataccgcaggcggttcactttatatgtcacattttggtatttcaacatatattgatggagaaggcgaagacggaggttcatccggtactattcaatggtgggataaaacttacagtgatagcggtatgaatggcataacaatcaattcctatggtggtgtcgttgcactaacgtcagataataatcgggttgttctggagtcttacgcttcatcgaatatcaaaagcaaacaggcaccggtgtatttatatccaaacacagacaaagtgcctggattaaaccgatttgcattcacgctgtctaatgcagataatgcttattcgagtgacggttatattatgtttggttctgatgagaactatgattacggtgcgggtatcaggttttctaaagaaagaaataaaggtcttgttcaaattgttaatggacgatatgcaacaggtggagatacaacaatcgaagcagggtatggcaaatttaatatgctgaaacgacgtgatggtaataggtatattcatatacagagtacagacctactgtctgtaggttcagatgatgcaggagataggatagcttctaactcaatttatagacgtacttattcggccgcagctaatttgcatattacttctgctggcacaattgggcgttcgacatcagcgcgtaaatacaagttatctatcgaaaatcaatataacgatagagatgaacaactggaacattcaaaagctattcttaacttacctattagaacgtggtttgataaagctgagtctgaaattttagctagagagctgagagaagatagaaaattatcggaagacacctataaacttgatagatacgtaggtttgattgctgaagaggtggagaatttaggattaaaagagtttgtcacgtatgatgacaaaggagaaattgaaggtatagcgtatgatcgtctatggattcatcttatccctgttatcaaagaacaacaactaagaatcaagaaattggaggagtcaaagaatgcaggataa

SEQ ID NO: 7582 - protein, 1261 aa, Staphylococcus aureus
  misc_feature (644)..(644): Xaa can be any naturally occurring amino acid
MIHVLDFNDKIIDFLSTDDPSLVRAIHKRNVNDNSEMLELLISSERAEKFRERHRVIIRDSNKQWREFIINWVQDTMDGYTEIECIASYLADITTAKPYAPGKFEKKTTSEALKDVLSDTGWEVSEQTEYDGLRTTSWTSYQTRYEVLKQLCTTYKMVLDFYIELSSNTVKGRYVVLKKKNSLFKGKEIEYGKDLVGLTRKIDMSEIKTALIAVGSENDKGKRLELVVTDDEAQSQFNLPMRYIWGIYEPQSDDQNMNETRLSSLAKTELNKRKSAVMSYEITSTDLEVTYPHEIISIGDTVRVKHRDFNPPLYVEAEVIAEEYNIISENSTYTFGQPKEFKESELREEFNKRLNLIHQKLNDNISNINTIVKDVVDGELEYFERKIHKSDTPPENPVNDTLWYDTSNPDVAVLRRYWNGRWIEATPNDVEKLGGITREKALFSELNNIFINLSIQHASLLSEATELLNSEYLVDNDLKADLQASLDAVIDVYNQIKNNLESMTPETATIGRLVDTKTLFLEYRKKLQDVYTDVEDVKIAISDRFKLLQSQYTDEKYKEALEIIATKFGLTVNEDLQLVGEPNVVKSAIEAARESTKEQLRDYVKTSDYKTDKDGIVERLDTAEAERTTLKGEIKDKVTLNEYXNGLEEQKQYTDDQLSDLSNNPEIKASIEQANQEAQEALKSYIDAQDNLKEKESQAYADGKISEEEQRAIQDAQAKLEEAKQNAELKARNAEKKANAYTDNKVKESTDAQRRTLTRYGSQIIQNGKEIKLRTTKEEFNATNRTLSNILNEIVQNVTDGTTIRYDDNGVAQALNVGPRGIRLNADKIDINGNREINLLIQNMRDKVDKTDIVNSLNLSREGLDINVNRIGIKGGNNNRYVQIQNDSIELGGIVQRTWKGKRSTDDIFTRLKDGHLRFRNNTAGGSLYMSHFGISTYIDGEGEDGGSSGTIQWWDKTYSDSGMNGITINSYGGVVALTSDNNRVVLESYASSNIKSKQAPVYLYPNTDKVPGLNRFAFTLSNADNAYSSDGYIMFGSDENYDYGAGIRFSKERNKGLVQIVNGRYATGGDTTIEAGYGKFNMLKRRDGNRYIHIQSTDLLSVGSDDAGDRIASNSIYRRTYSAAANLHITSAGTIGRSTSARKYKLSIENQYNDRDEQLEHSKAILNLPIRTWFDKAESEILARELREDRKLSEDTYKLDRYVGLIAEEVENLGLKEFVTYDDKGEIEGIAYDRLWIHLIPVIKEQQLRIKKLEESKNAG

SEQ ID NO: 7583 - DNA, 3786 bp, Staphylococcus aureus
  misc_feature (1552)..(1552): n is a, c, g or t
gtgatacatgttttagattttaacgacaagattatagatttcctttctactgatgacccttccttagttagagcgattcataaacgtaatgttaatgacaattcagaaatgcttgaactgctcatatcatcagaaagagctgaaaagttccgtgaacgacatcgtgttattataagggattcaaacaaacaatggcgtgaatttattattaactgggttcaagatacgatggacggctacacagagatagaatgtatagcgtcttatcttgctgatataacaacagctaaaccgtatgcaccaggaaaatttgagaaaaagacaacttcagaagcattgaaagatgtgttgagcgatacaggttgggaagtttctgaacaaaccgaatacgatggcttacgtactacgtcatggacttcttatcaaactagatatgaagttttaaagcaattatgtacaacctataaaatggttttagatttttatattgagcttagctctaataccgtcaaaggtagatatgtagtactcaaaaagaaaaacagcttattcaaaggtaaagaaattgaatatggtaaagatttagtcgggttaactaggaagattgatatgtcagaaatcaaaacagcattaattgctgtgggatctgaaaatgacaaagggaagcgtttagagctagttgtgacagatgacgaagcgcaaagtcaattcaacctacctatgcgctatatttgggggatatatgaaccacaatcagatgatcaaaatatgaatgaaacacgattaagttctttagccaaaacagagttaaataaacgtaagtcggcagttatgtcatatgagattacttctactgatttggaagttacgtatccgcacgagattatatcaattggcgatacagtcagagtaaaacatagagattttaacccgccattgtatgtagaggcagaagttattgctgaagaatataacataatttcagaaaatagcacatatacattcggtcaacctaaagagttcaaagaatcagaattacgagaagagtttaacaagcgattaaacctaatacaccaaaaattaaacgacaatattagcaatatcaatactatagtaaaagatgttgtagatggtgaattagaatactttgaacgcaaaattcataaaagtgatacaccgccagaaaatccagtcaatgatacgctttggtatgatacaagtaaccctgatgttgctgtcttgcgtagatattggaatggtcgatggattgaagcaacaccaaatgatgttgaaaaattaggtggtataacaagagagaaagcgctattcagtgaattaaacaatatttttattaatttatctatacaacacgctagtcttttgtcagaagctacagaattactgaatagcgagtacttagtagataatgatttgaaagcggacttacaagcaagtttagacgctgtgattgatgtttataatcaaattaaaaataatttagaatctatgacacccgaaactgcaacgattggtcggttggtagatacaaaanctttatttcttgagtatagaaagaaattacaagatgtttatacagatgtagaagatgtcaaaatcgccatttcagatagatttaaattattacagtcacaatacactgatgaaaaatataaagaagcgttggaaataatagcaacaaaatttggtttaacggtgaatgaagatttgcagttagtcggagaacctaatgttgttaaatcagctattgaagcagctagagaatccacaaaagaacaattacgtgactatgtaaaaacatcggactataaaacagacaaagacggtattgttgaacgtttagatactgctgaagctgagagaacgactttaaaaggtgaaatcaaagataaagttacgttaaacgaatatcaaaacggattggaagaacaaaaacaatatactgatgaccagttaagtgatttgtccaataatcctgagattaaagcaagtattgaacaagcaaatcaagaagcgcaagaagctttaaaatcatacattgatgctcaagataatcttaaagagaaggaatcgcaagcgtatgctgatggtaaaatttcggaagaagagcaacgcgctatacaagatgctcaagctaaacttgaagaggcaaaacaaaacgcagaactaaaggctagaaacgctgaaaagaaagctaatgcttatacagacaacaaggtcaaagaaagcacagatgcacagaggagaacactgactcgctatggttctcaaattatacaaaatggtaaggaaatcaaattaagaactactaaagaagagtttaatgcaaccaatcgtacactttcaaatatattaaacgagattgtccaaaacgttacagatggaacaacaatcagatatgatgataacggagtggctcaagctttaaatgtggggccacgtggtattagattaaatgctgataaaattgatattaacggtaatagagaaataaaccttcttatccaaaatatgcgagataaagtagataaaaccgatattgtcaacagccttaatttatcaagagagggtcttgatatcaatgttaatagaattggaattaaaggcggtaacaataacagatatgttcaaatacagaatgattctattgaactaggtggtattgtgcaacgaacttggaaaggcaaacgatcaaccgatgatatattcacacgtcttaaagatggacatctaaggtttagaaataataccgcaggcggttcactttatatgtcacattttggtatttcaacatatattgatggagaaggcgaagacggaggttcatccggtactattcaatggtgggataaaacttacagtgatagcggtatgaatggcataacaatcaattcctatggtggtgtcgttgcactaacgtcagataataatcgggttgttctggagtcttacgcttcatcgaatatcaaaagcaaacaggcaccggtgtatttatatccaaacacagacaaagtgcctggattaaaccgatttgcattcacgctgtctaatgcagataatgcttattcgagtgacggttatattatgtttggttctgatgagaactatgattacggtgcgggtatcaggttttctaaagaaagaaataaaggtcttgttcaaattgttaatggacgatatgcaacaggtggagatacaacaatcgaagcagggtatggcaaatttaatatgctgaaacgacgtgatggtaataggtatattcatatacagagtacagacctactgtctgtaggttcagatgatgcaggagataggatagcttctaactcaatttatagacgtacttattcggccgcagctaatttgcatattacttctgctggcacaattgggcgttcgacatcagcgcgtaaatacaagttatctatcgaaaatcaatataacgatagagatgaacaactggaacattcaaaagctattcttaacttacctattagaacgtggtttgataaagctgagtctgaaattttagctagagagctgagagaagatagaaaattatcggaagacacctataaacttgatagatacgtaggtttgattgctgaagaggtggagaatttaggattaaaagagtttgtcacgtatgatgacaaaggagaaattgaaggtatagcgtatgatcgtctatggattcatcttatccctgttatcaaagaacaacaactaagaatcaagaaattggaggagtcaaagaatgcaggataa

SEQ ID NO: 7584 - protein, 1261 aa, Staphylococcus aureus
  misc_feature (518)..(518): Xaa can be any naturally occurring amino acid
MIHVLDFNDKIIDFLSTDDPSLVRAIHKRNVNDNSEMLELLISSERAEKFRERHRVIIRDSNKQWREFIINWVQDTMDGYTEIECIASYLADITTAKPYAPGKFEKKTTSEALKDVLSDTGWEVSEQTEYDGLRTTSWTSYQTRYEVLKQLCTTYKMVLDFYIELSSNTVKGRYVVLKKKNSLFKGKEIEYGKDLVGLTRKIDMSEIKTALIAVGSENDKGKRLELVVTDDEAQSQFNLPMRYIWGIYEPQSDDQNMNETRLSSLAKTELNKRKSAVMSYEITSTDLEVTYPHEIISIGDTVRVKHRDFNPPLYVEAEVIAEEYNIISENSTYTFGQPKEFKESELREEFNKRLNLIHQKLNDNISNINTIVKDVVDGELEYFERKIHKSDTPPENPVNDTLWYDTSNPDVAVLRRYWNGRWIEATPNDVEKLGGITREKALFSELNNIFINLSIQHASLLSEATELLNSEYLVDNDLKADLQASLDAVIDVYNQIKNNLESMTPETATIGRLVDTKXLFLEYRKKLQDVYTDVEDVKIAISDRFKLLQSQYTDEKYKEALEIIATKFGLTVNEDLQLVGEPNVVKSAIEAARESTKEQLRDYVKTSDYKTDKDGIVERLDTAEAERTTLKGEIKDKVTLNEYQNGLEEQKQYTDDQLSDLSNNPEIKASIEQANQEAQEALKSYIDAQDNLKEKESQAYADGKISEEEQRAIQDAQAKLEEAKQNAELKARNAEKKANAYTDNKVKESTDAQRRTLTRYGSQIIQNGKEIKLRTTKEEFNATNRTLSNILNEIVQNVTDGTTIRYDDNGVAQALNVGPRGIRLNADKIDINGNREINLLIQNMRDKVDKTDIVNSLNLSREGLDINVNRIGIKGGNNNRYVQIQNDSIELGGIVQRTWKGKRSTDDIFTRLKDGHLRFRNNTAGGSLYMSHFGISTYIDGEGEDGGSSGTIQWWDKTYSDSGMNGITINSYGGVVALTSDNNRVVLESYASSNIKSKQAPVYLYPNTDKVPGLNRFAFTLSNADNAYSSDGYIMFGSDENYDYGAGIRFSKERNKGLVQIVNGRYATGGDTTIEAGYGKFNMLKRRDGNRYIHIQSTDLLSVGSDDAGDRIASNSIYRRTYSAAANLHITSAGTIGRSTSARKYKLSIENQYNDRDEQLEHSKAILNLPIRTWFDKAESEILARELREDRKLSEDTYKLDRYVGLIAEEVENLGLKEFVTYDDKGEIEGIAYDRLWIHLIPVIKEQQLRIKKLEESKNAG

SEQ ID NO: 7585 - DNA, 345 bp, Staphylococcus aureus
  misc_feature (164)..(164): n is a, c, g or t
atgataacatttgagaatatacaacaacttgagaaatacaccttaatgactatgcatggtctttttaatcaacttaaactcggcattatttcaatcgaaaacgcagagcatacgctttttacaccttatatgttggaaacgctctcttccctaggcgtgaaagncagcattgtcgatttaattcataaagggactgaattagaagactttgcggcatttaatttatcaattgaagacacagttacagtctgtttacaaagaactgaagaactattaaaacaatacaaaaatgtggaattcaatgacaaaatattaatcaattggcgtattatacaagagaaatag

SEQ ID NO: 7586 - protein, 114 aa, Staphylococcus aureus
  misc_feature (55)..(55): Xaa can be any naturally occurring amino acid
MITFENIQQLEKYTLMTMHGLFNQLKLGIISIENAEHTLFTPYMLETLSSLGVKXSIVDLIHKGTELEDFAAFNLSIEDTVTVCLQRTEELLKQYKNVEFNDKILINWRIIQEK

SEQ ID NO: 7587 - DNA, 501 bp, Staphylococcus aureus
  misc_feature (46)..(46): n is a, c, g or t
atgactttcgaagaaaaattaagtcaaatgtataacgagattgcgnatgagatcagtgggatgataccagtagaatgggagcaagtatttacaatagcctacgtagatgatgaaggtggagaagtcgtttttaattatactaaaccaggtagcgaggaattgaattattacacatatatccctagagagtataatgtctctgaaaaagaattttatgatttgtggacagatttatatagattgtttaagaagttaagaaacgcatttaaagaagaagatttagaaccatggacatcatgtgaatttgattttacaagagagggtaatttgaaagtatcgtttgattatatagattggattaaattaggttttggtccatcaggaaaggaaaactactatatgtataaaaagtttggtgttttaccagaaacggaatatgaaattaataaagttaaagaaatcgagcaatatgttaaagagcaagaagaaactaacctttag

SEQ ID NO: 7588 - protein, 166 aa, Staphylococcus aureus
  misc_feature (16)..(16): Xaa can be any naturally occurring amino acid
MTFEEKLSQMYNEIAXEISGMIPVEWEQVFTIAYVDDEGGEVVFNYTKPGSEELNYYTYIPREYNVSEKEFYDLWTDLYRLFKKLRNAFKEEDLEPWTSCEFDFTREGNLKVSFDYIDWIKLGFGPSGKENYYMYKKFGVLPETEYEINKVKEIEQYVKEQEETNL

SEQ ID NO: 7589 - DNA, 495 bp, Staphylococcus aureus
  misc_feature (122)..(122): n is a, c, g or t
atgactgagtttactcatattaatcaacaaggccacgccaaaatggtcgatgtatcagacaaacaaattacaaaaagaactgctgtcgctcattcaagcattactgtgaatgaaactatttntaagcagatttctaataacaccaataccaaaggcaatgtattgaacactgctcaaatcgctggtattatggctgccaaaaatacatcaacaattattccgatgtgccatccattaccattgactggcatagatgttcacttcagctgggatgaaacaaatgcacccctttatactttaaacattcaaacaactgtctctacaactggcaaaaccggtgttgaaatggaagctttaaccgctgcatcagcaacggctttaaccatttacgacatgacgaaagcagttgataaaggtatgattattggcgaaacctaccttgaaagcaagtctggcggtaaatctggagattttcaacgccaattagatcaataa

SEQ ID NO: 7590 - protein, 164 aa, Staphylococcus aureus
  misc_feature (41)..(41): Xaa can be any naturally occurring amino acid
MTEFTHINQQGHAKMVDVSDKQITKRTAVAHSSITVNETIXKQISNNTNTKGNVLNTAQIAGIMAAKNTSTIIPMCHPLPLTGIDVHFSWDETNAPLYTLNIQTTVSTTGKTGVEMEALTAASATALTIYDMTKAVDKGMIIGETYLESKSGGKSGDFQRQLDQ

SEQ ID NO: 7591 - DNA, 1944 bp, Staphylococcus aureus
  misc_feature (936)..(936): n is a, c, g or t
atgaaaataaataagttaactatatcgaactttgctggaatcaaagaagaaaaatttaactttgacggtaaagatgcaaaaatatacggcaataatgcgactggcaagactacaacagcaaccgcattacaatggctgcttttcgataagggtttagacggttcaaccaaatcatttaaccctgtacctttaaacgaaaaaaacgaagaaaattatgagttaattccgactgttttcgcagaatttgaaatcgacggaaaaattacgacttttaaaaaagagtcacatcctaaatacacaataaatcaaaaaacgaatcgcaaggaatactcacgaagtcgaacgaagaaacaatatatcaatgatgaatcaataaaagtaaaggattataaagctcgtattgatgaactgattgatgaagatgtattcaagttaattacgaaccctcaagcatttaacttactagattggaagaaacgaagaagtttgttgtttgaaatcgctaaaccaatcaatgatgaggatgtcattaaaacaaatgatgattttaaagaactaaataatattcttggagatcacgaaattgaaacaaagaaaaagattcttacagacaagataaaacagattaacaaagatatcaaagatattccgatacgtattaaccaaacgcaacaaaataagcaggatgtaccggaattcgataatgatagacacacaatcataaaacaagaaattgagcaacttgaaaatgagcgtatagatattcaaaacggtgcagaagaaattaatttgcgtaaccaattagctgataaacaatcagaattgaagcgcatagaagctaataatagcgccagtaatgagaacaaaatacatgctttaacaaatgagctacacgttgaaaatggaacggttgcgaatcttaaaacaagattaaancaaaacaaacaacaaattacacatgaagaaaatcgacgtaatcaattattagaaaatcataaaggattaaaaagtgatttagaaaaagctaaaaatcaaaaatttgaatatcttgatgacaatgtatgtagttgttgtggtcaacagttaccagctgaacaagtgagtgaggtaagagaaaaagcattgcagaaattcaatgcaaacaaatcgaaagaattagaaacaatacaaacatctatcaatcacattatttcagaggacaagaaaataaagccaattatcgagaaattagaggatgacaacaataatttacaaattaaaatcaacgaagcagaagagcgttcagcaagaatacaaaacaaaattaataagttgaaaacaactcacgttgacgttacgcaaactgacgaatacaaagcagtaatgttagagataaatgagattaatcaaaaacgctctaacatcaggaaaactattcaagataaagtttcaggaatagatgacaaaataagcgaacttactcaagaaaaatcagaaattgaagtgtcaatatcaatcgaaaaatcaaataaacatctagatgatgttatttctgaattaagaaatgaagaagacagattattggatgaaaaagaaaagtattcacatgacctttatatcttaaaagaatttacaacaacaaaagtcaaaatgcttactgaaaacatcaataacgaatttgatattgctgaatttaagctattcaataccttagttaacggcgaattagaagaaacatgttcaacaacggttaatggtgtcgagtatgacagcggtttaaataacgcctcaagaattaatgttggcttagatatcatcaacacactatcaaaacattttaaagttacagcgccaatatttattgataatgctgaatcagtaacagagcttatcaaaacagaatcacaacaaattcaattgatagtaaatgaacaagataaaaaattaagaatggagactatataa

SEQ ID NO: 7592 - protein, 647 aa, Staphylococcus aureus
  misc_feature (312)..(312): Xaa can be any naturally occurring amino acid
MKINKLTISNFAGIKEEKFNFDGKDAKIYGNNATGKTTTATALQWLLFDKGLDGSTKSFNPVPLNEKNEENYELIPTVFAEFEIDGKITTFKKESHPKYTINQKTNRKEYSRSRTKKQYINDESIKVKDYKARIDELIDEDVFKLITNPQAFNLLDWKKRRSLLFEIAKPINDEDVIKTNDDFKELNNILGDHEIETKKKILTDKIKQINKDIKDIPIRINQTQQNKQDVPEFDNDRHTIIKQEIEQLENERIDIQNGAEEINLRNQLADKQSELKRIEANNSASNENKIHALTNELHVENGTVANLKTRLXQNKQQITHEENRRNQLLENHKGLKSDLEKAKNQKFEYLDDNVCSCCGQQLPAEQVSEVREKALQKFNANKSKELETIQTSINHIISEDKKIKPIIEKLEDDNNNLQIKINEAEERSARIQNKINKLKTTHVDVTQTDEYKAVMLEINEINQKRSNIRKTIQDKVSGIDDKISELTQEKSEIEVSISIEKSNKHLDDVISELRNEEDRLLDEKEKYSHDLYILKEFTTTKVKMLTENINNEFDIAEFKLFNTLVNGELEETCSTTVNGVEYDSGLNNASRINVGLDIINTLSKHFKVTAPIFIDNAESVTELIKTESQQIQLIVNEQDKKLRMETI

SEQ ID NO: 7593 - DNA, 720 bp, Staphylococcus aureus
  misc_feature (187)..(187): n is a, c, g or t
atgaaaagaatacttatcattgttgttttattgttttgctattcgcaaaatcatatcgcaaccgctgatgtcggagttttgaatcttaggaactattatggtagctatccaattgaagaccaccaaagtattaatcctgaaaataatcatctttcgcatcaattagttttttctatggataattcgncaataacagctgaatttaagaacgttgatgatgtaaagaaattcaaaaatcatgctgtagatgtatatggtctaagttatagtggatattgtttgaaaaacaaatatatatacggtggagttacattagcaggtgattatttagagaaatctagatgtattcctattaatctttgggttaatggagaacatcaaactatatctactgacaaagtatcaactaataaaaagttagtaacagctcaagaaattgatactaaattaagaagatatctacaagaagaatataatatttatggctttaatgatacaaataaaggaagaaattatggtaataagtcaaaatttagttctggatttaatgcaggaaaaatattatttcatttgaatgatggttcatcattttcttatgacttatttgatactggaacaggacaagctgaaagtttcttaaaaatatataatgacaacaaaactgtcgaaactgaaaaattccatttagatgtagaaatatcttataaggacgaaagttga

SEQ ID NO: 7594 - protein, 239 aa, Staphylococcus aureus
  misc_feature (63)..(63): Xaa can be any naturally occurring amino acid
MKRILIIVVLLFCYSQNHIATADVGVLNLRNYYGSYPIEDHQSINPENNHLSHQLVFSMDNSXITAEFKNVDDVKKFKNHAVDVYGLSYSGYCLKNKYIYGGVTLAGDYLEKSRCIPINLWVNGEHQTISTDKVSTNKKLVTAQEIDTKLRRYLQEEYNIYGFNDTNKGRNYGNKSKFSSGFNAGKILFHLNDGSSFSYDLFDTGTGQAESFLKIYNDNKTVETEKFHLDVEISYKDES

SEQ ID NO: 7595 - DNA, 1176 bp, Staphylococcus aureus
  misc_feature (390)..(390): n is a, c, g or t
atgtttattggcaagaatttagaatacgtgagaaagcttaatgctctaagtagaaaagaattatcagaaaaaataaatgtgagtgaacaagcaatttggcaatatgaaacaaaaaatatgatgccagaaattagtaaaatttatgatatgacatctatttttaatgttaaatctagctactttattagcgagcagcccgaagagctcctaataaattctgtcgataaacatagtatagcttttagagcaaaaaattataaagtatctacgaaactattaaataagcaatattatcaagcaatgtatttatctaatttaactagctacttattttcttttgtaaagataccggataatattattttatctttaataaataatttaaatganttgttgaatggcaatttagaatcactaaataaaaaagaaagcataaaagaaactgctaaagttgtgagggctaaaattcttcaagacgaaagcaatgaagcactattatttatgcttgaaaaagcgggtatagttatatacgaaaagcgaattaatgatagcatagacgcatatagtttttggagtaaagatcagacaccttttattatactgggtacaaataagggggtagcagttagaaggaattttgatcttgcacatgagctgggacatctcgttctacatcgtcatattcaattcgacttattatctcctgaagaatataagacaattgaacatgaggcagatattttcgcctctgaatttttactacctgaagaagcgtttaaaaaagactttgatcaaatgaccaaaaaatcaaatcctgactatttagctgtattgaaagaaaaatggtatgtttctatacaagcaattgcaatgagagcctattatctaggtctaatgtctagtactcagtacagatatttttgggcatcattaaataaaaaaggctataaaagtaaagagcctttagacgacgtgattgaaatgtcacgtcctgtcaaaatgaatagtttattaaagttgtattttgatagaaatatactgacaccacaaaaattattgaattatttaaaagtcgatgaaacatttttgaatcatctagcaggtattaatttaaaactctttaaggactatgttaatgaaaatagagaatataatataacgaatctatataaataa

SEQ ID NO: 7596 - protein, 391 aa, Staphylococcus aureus
  misc_feature (130)..(130): Xaa can be any naturally occurring amino acid
MFIGKNLEYVRKLNALSRKELSEKINVSEQAIWQYETKNMMPEISKIYDMTSIFNVKSSYFISEQPEELLINSVDKHSIAFRAKNYKVSTKLLNKQYYQAMYLSNLTSYLFSFVKIPDNIILSLINNLNXLLNGNLESLNKKESIKETAKVVRAKILQDESNEALLFMLEKAGIVIYEKRINDSIDAYSFWSKDQTPFIILGTNKGVAVRRNFDLAHELGHLVLHRHIQFDLLSPEEYKTIEHEADIFASEFLLPEEAFKKDFDQMTKKSNPDYLAVLKEKWYVSIQAIAMRAYYLGLMSSTQYRYFWASLNKKGYKSKEPLDDVIEMSRPVKMNSLLKLYFDRNILTPQKLLNYLKVDETFLNHLAGINLKLFKDYVNENREYNITNLYK

SEQ ID NO: 7597 - DNA, 1176 bp, Staphylococcus aureus
  misc_feature (344)..(344): n is a, c, g or t
atgtttattggcaagaatttagaatacgtgagaaagcttaatgctctaagtagaaaagaattatcagaaaaaataaatgtgagtgaacaagcaatttggcaatatgaaacaaaaaatatgatgccagaaattagtaaaatttatgatatgacatctatttttaatgttaaatctagctactttattagcgagcagcccgaagagctcctaataaattctgtcgataaacatagtatagcttttagagcaaaaaattataaagtatctacgaaactattaaataagcaatattatcaagcaatgtatttatctaatttaactagctacttattttcttttgtaangataccggataatattattttatctttaataaataatttaaatgacttgttgaatggcaatttagaatcactaaataaaaaagaaagcataaaagaaactgctaaagttgtgagggctaaaattcttcaagacgaaagcaatgaagcactattatttatgcttgaaaaagcgggtatagttatatacgaaaagcgaattaatgatagcatagacgcatatagtttttggagtaaagatcagacaccttttattatactgggtacaaataagggggtagcagttagaaggaattttgatcttgcacatgagctgggacatctcgttctacatcgtcatattcaattcgacttattatctcctgaagaatataagacaattgaacatgaggcagatattttcgcctctgaatttttactacctgaagaagcgtttaaaaaagactttgatcaaatgaccaaaaaatcaaatcctgactatttagctgtattgaaagaaaaatggtatgtttctatacaagcaattgcaatgagagcctattatctaggtctaatgtctagtactcagtacagatatttttgggcatcattaaataaaaaaggctataaaagtaaagagcctttagacgacgtgattgaaatgtcacgtcctgtcaaaatgaatagtttattaaagttgtattttgatagaaatatactgacaccacaaaaattattgaattatttaaaagtcgatgaaacatttttgaatcatctagcaggtattaatttaaaactctttaaggactatgttaatgaaaatagagaatataatataacgaatctatataaataa

SEQ ID NO: 7598 - protein, 391 aa, Staphylococcus aureus
  misc_feature (115)..(115): Xaa can be any naturally occurring amino acid
MFIGKNLEYVRKLNALSRKELSEKINVSEQAIWQYETKNMMPEISKIYDMTSIFNVKSSYFISEQPEELLINSVDKHSIAFRAKNYKVSTKLLNKQYYQAMYLSNLTSYLFSFVXIPDNIILSLINNLNDLLNGNLESLNKKESIKETAKVVRAKILQDESNEALLFMLEKAGIVIYEKRINDSIDAYSFWSKDQTPFIILGTNKGVAVRRNFDLAHELGHLVLHRHIQFDLLSPEEYKTIEHEADIFASEFLLPEEAFKKDFDQMTKKSNPDYLAVLKEKWYVSIQAIAMRAYYLGLMSSTQYRYFWASLNKKGYKSKEPLDDVIEMSRPVKMNSLLKLYFDRNILTPQKLLNYLKVDETFLNHLAGINLKLFKDYVNENREYNITNLYK

SEQ ID NO: 7599 - DNA, 1623 bp, Acinetobacter baumannii
  misc_feature (1567)..(1567): n is a, c, g or t
atggtgttgaaaagtgatggatattcttcagaccatattcggttaaatcgtttcgtattttggagttcggcagtcagtatcggcatttttggcctattatttgtgctgtttccagaaaaaagtcagttttggctgacctatgtgcaagagcaggtaaaccactttttcgggtggtattacatgttggtgattgtgctgtgtttaggctttgtggcttggcttgccttctcaaaagtgggacagattcctttaggaaaagaccacgacaaacctgagtttggctatttggcttggacctcaatgctgttttcggcaggtattggtatcgcgctactttattatggtgttgctgaacctgttgaccattttctaagaccgccagaaggtgaggcaggtactattcaggccgcccgtaatgccatgacctatagctttttgcactggggtattcatggctgggtgctttatgccttgctgggtgtgacattaggttattttgcctttagacaagatttaccactcgcactacgctcggcactctatccaatttttggagagcgtgttcatggtctggtaggtgattttgtcgatggctttggtattttagcaaccgtaatttctttggtgaccaacttaggtattggtgctttggtattggtttcaggcatttgttatttaattcctgaaattcctgataactctgcaactttaattactgcagttttaatcatgatgtttgtggcgacagtcactacagtgatcgggattgaaaaaggcttggcatggttatcacggattaatttacgtttgctctatgctttacttttatttgtatttttaacaggaccgacgaaccatttgttaaatggtcttgtgcaaaatacgggcgattaccttaataattttatgggtaaaagttttgatatgtatttatacaatcaaaaagccagtggctggttgggttcatggactgtgttttattgggcatggtggattgcttgggcaccttttgtaggaatgtttattgcccgcatttccaaaggccgaactattcgagaagtggttttgggggtatgtctcattccattaggttttaccttggcttggatctcgatttttggaaatactgcaattcatttaattctcaatcaaaaacagaaagttttaggtgatatggttttaagtgaccctgcgttgtcattattcaaattactcgaatatctcccgtttaatccgtatattgccgggattgttgttgtaatttgtttcgttttatttttgacaccggttgggtctggtacactaatgatcgccaatttgtcctcgaaagggggcaccagtgatagtgattcaccgatctggttacgcatcttttggtctgtggtcattaccattgtaagtatcggcttattattagcaggtagttttaactccatgcaaagtgcagtggtgttatgtggtttaccattttctgtgattattttgctttatatgtttggtctagccaaagccttaaagcaagatgattttgacccgaatgttgcgaaaaagcagttagctatttcanaagacatttctattccatcgaattgtgaccagagcaaagtgaccgaggttttataa

SEQ ID NO: 7600 - protein, 540 aa, Acinetobacter baumannii
  misc_feature (523)..(523): Xaa can be any naturally occurring amino acid
MVLKSDGYSSDHIRLNRFVFWSSAVSIGIFGLLFVLFPEKSQFWLTYVQEQVNHFFGWYYMLVIVLCLGFVAWLAFSKVGQIPLGKDHDKPEFGYLAWTSMLFSAGIGIALLYYGVAEPVDHFLRPPEGEAGTIQAARNAMTYSFLHWGIHGWVLYALLGVTLGYFAFRQDLPLALRSALYPIFGERVHGLVGDFVDGFGILATVISLVTNLGIGALVLVSGICYLIPEIPDNSATLITAVLIMMFVATVTTVIGIEKGLAWLSRINLRLLYALLLFVFLTGPTNHLLNGLVQNTGDYLNNFMGKSFDMYLYNQKASGWLGSWTVFYWAWWIAWAPFVGMFIARISKGRTIREVVLGVCLIPLGFTLAWISIFGNTAIHLILNQKQKVLGDMVLSDPALSLFKLLEYLPFNPYIAGIVVVICFVLFLTPVGSGTLMIANLSSKGGTSDSDSPIWLRIFWSVVITIVSIGLLLAGSFNSMQSAVVLCGLPFSVIILLYMFGLAKALKQDDFDPNVAKKQLAISXDISIPSNCDQSKVTEVL

SEQ ID NO: 7601 - DNA, 1914 bp, Acinetobacter baumannii
  misc_feature (240)..(240): n is a, c, g or t
atgacaaagtctggccattatttagtgcttgcaataatgggactgctgagcggttgtcaggtcattcatttaaaagaaagtaacttaagcagtgctttaaaaagtaaaaatgaaagcattttgaccgacgatactttaagtcatcaaacccaaaacttgctgtatttggtcaaagaaagtgaaacgtcttgtctgcaaaacttcaatgtttgtttaaataaaattcagggattgtctganaatagcagccgagaagaacgttatgcggcgctgagtgaaatttatttggcaaaagctttagatgttgggcgtagtagccagtgcaatgccactcttaaaagtaacagttgtgttgagcaagagcttgcgttgtttgataaaagcttgcgctatagctatgtctatttgtttgattctgaagagtcaccttttgatcgggtatttgaccatcgccaaaatcaggtacgtatcttttataacgtcgctttgtcgaagctcatgaccacgtattttaattatttaaatacgcttcatttcccacctttactaaaagcagatgggcatgagtaccacgttaactttgatcatgctgtagatgtacagcatattgaagtcgatacctttcgctctagctataacatgaacttttcagggtttaataccgtcaaccgtaaggatggtttaggtgcggaatttattgtgggacgtaaggagcatgatgtaaatcatggcttcatcttagaccccgataatttttatgctcaccagagtaatcccaatattcatttaccacgcttctttccagtcacggctattgcttacccaaaacaaaaggccacagccgatcaggtcattgatggggcagagttagaaattgcgatgttcgatccctacaggcaagaccgtgtaaaagttgaaggtgtggattatccactcactgctaactattcggcgccttatgggctatggttatcgaaatataatttaggtgcagcaggctattggtctttaattaataaagaagccaatttgattatgccgcatttatatatgctggaaccctttaaccccaataagaaaattattgtgtttattcatggcttggcgagcagcccagaggcatgggtgagcctaaccaatgacattatgggtgatgccgaattaagacaaaactaccaagtttggcaggtattttattcaaccaatatgccaatttttgaaagtcgttttcagatttattctttgctgaatcaagcttttcaaaatgttgctaaagacagttatgccgcacatgatgccgtattggttggacatagtatgggcggagtgattagccgcttgctagtaagcgatgcagatgtttctgatttagccatgcaaaaaatgaatgaagcacagctaaagcgtttaaaagaaaatccggttattcgtgagcgttttcagttcaaagatttgccctattttaagcgggttgtttttgtttcggcgccgcatcatggtactgactatgctgaccgatggtttacccaaattgctcgccgtattattcgcttacctgccgacttttttattgcggtcgaaatgcgagatgagaaaaataccaaactcagaaaaggcttaattgaaaatggagcgagtaatttaagtcgctcttctaactttatgcagttgacccaagccattcaaccctcgtccaacgtggtctatcactcaattatgggcaacataaatggtacgacagataagtcaaaaatgagcgatgggattgtgccgtatcaaagttcacatttgggtggggagcagtcggagctgattattaaaggtgggcattcgattcaaactagccctgaggcaattttagaattacgccgtattttacgattgcatttaaagcagtcacagccttcaaaatag

SEQ ID NO: 7602 - protein, 637 aa, Acinetobacter baumannii
  misc_feature (80)..(80): Xaa can be any naturally occurring amino acid
MTKSGHYLVLAIMGLLSGCQVIHLKESNLSSALKSKNESILTDDTLSHQTQNLLYLVKESETSCLQNFNVCLNKIQGLSXNSSREERYAALSEIYLAKALDVGRSSQCNATLKSNSCVEQELALFDKSLRYSYVYLFDSEESPFDRVFDHRQNQVRIFYNVALSKLMTTYFNYLNTLHFPPLLKADGHEYHVNFDHAVDVQHIEVDTFRSSYNMNFSGFNTVNRKDGLGAEFIVGRKEHDVNHGFILDPDNFYAHQSNPNIHLPRFFPVTAIAYPKQKATADQVIDGAELEIAMFDPYRQDRVKVEGVDYPLTANYSAPYGLWLSKYNLGAAGYWSLINKEANLIMPHLYMLEPFNPNKKIIVFIHGLASSPEAWVSLTNDIMGDAELRQNYQVWQVFYSTNMPIFESRFQIYSLLNQAFQNVAKDSYAAHDAVLVGHSMGGVISRLLVSDADVSDLAMQKMNEAQLKRLKENPVIRERFQFKDLPYFKRVVFVSAPHHGTDYADRWFTQIARRIIRLPADFFIAVEMRDEKNTKLRKGLIENGASNLSRSSNFMQLTQAIQPSSNVVYHSIMGNINGTTDKSKMSDGIVPYQSSHLGGEQSELIIKGGHSIQTSPEAILELRRILRLHLKQSQPSK

SEQ ID NO: 7603 - DNA, 276 bp, Acinetobacter baumannii
  misc_feature (241)..(241): n is a, c, g or t
atgtctctttataatttttcagtttttttgggtggattattatttgtatccattgcctctgccggctataaaagtcatgcacaccgtgacttttactcaaaatgcgtagccgctggacatagtcgcgcgacctgtctgtgtatttatcaccgtttagagcgccaatattctccaaaactcatgcataagcttggaaagttaagtctacaaagccctgaagtgccacgtgattttgtaaaanccatgcttcgaacgatgcaacagtgccagtcataa

SEQ ID NO: 7604 - protein, 91 aa, Acinetobacter baumannii
  misc_feature (81)..(81): Xaa can be any naturally occurring amino acid
MSLYNFSVFLGGLLFVSIASAGYKSHAHRDFYSKCVAAGHSRATCLCIYHRLERQYSPKLMHKLGKLSLQSPEVPRDFVKXMLRTMQQCQS

SEQ ID NO: 7605 - DNA, 219 bp, Acinetobacter baumannii
  misc_feature (19)..(19): n is a, c, g or t
atggctatgcgcccagatntacgtcgacatgctttagtcgtgattgtattctccctcgcacaatggtttttcatgcgctacatccttgcgaatgaattatttaacctcacgacgaaccaacgtattctttatttctgtgtaagcagtttagtcggtgcattacttatctttgttgcactgatttatatggtgctcaaaggtaatgcggataaaaagtaa

SEQ ID NO: 7606 - protein, 72 aa, Acinetobacter baumannii
  misc_feature (7)..(7): Xaa can be any naturally occurring amino acid
MAMRPDXRRHALVVIVFSLAQWFFMRYILANELFNLTTNQRILYFCVSSLVGALLIFVALIYMVLKGNADKK

SEQ ID NO: 7607 - DNA, 2469 bp, Acinetobacter baumannii
  misc_feature (1437)..(1437): n is a, c, g or t
atgagttcagagtctcaatcagcctctcaaacagaacaaaccaatgaaaaggcttatgattcctctagtattaaagtattacgtggattagatgcagttcgtaaacgtccgggtatgtatattggggatacagacgacggtaccggtttacaccatatggtgtttgaggttgtcgataatgcaatcgacgaagctttagctggccactgcgatgaaattattgtcacgattcacgaggatgaatcggtcagtgtttcagataatggccgcggtattccaaccgatattcaccctgaagaaggggtttctgctgcagaagtaattttaacgattctgcatgcaggcggtaagtttgacgataatagctataaagtttcaggtggcttacacggcgtaggtgtttcggttgttaacgcactttcaagtaaattgcatctaacaatttaccgtgctggtcaaatccatgagcaagaatatcatcatggcgatccgcaatatccattgcgtgtgattggtgaaacggataataccggaacaactgtacgtttttggccaagtgcagaaacattcagtcaaaccatttttaatgttgaaattctagcacgccgtttacgtgagctttctttcttgaatgctggtgtacgtatcgttttacgtgatgaacgtattaaccttgagcatgtgtatgactatgaaggtggtttatctgagtttgtaaaatacatcaacgaaggtaaaaaccatctcaacgaaatcttccatttcacagctgatgctgacaacggcattgctgtagaagtagcattgcaatggaacgatagttaccaagaaaatgttcgctgtttcacaaacaacattccacaaaaagatggtggtacgcacttagcaggtttccgcgcagctttaacacgtggcttaaaccagtatcttgaaaatgaaaatattctcaagaaagaaaaagtgaatgtgactggtgatgatgcgcgtgaaggtttaacagccattatttctgttaaggttcctgatccgaaattctcgtctcagacaaaagaaaaattggtatcaagtgaggtaaaaccagcggtagagcaagcaatgaacaaagagttctctgcttacttacttgagaatccacaagctgcaaaatcaattgcaggcaagattattgatgctgcacgcgcacgtgatgctgcacgtaaagcacgtgaaatgacacgccgtaagagtgcattagatattgcaggtttgcctggtaaattggctgactgtcaggaaaaagacccagcgctttctgaattgtatcttgtcgagggtgactctgcgggtggtagtgccaaacaaggccgtaaccgtaaaatgcaggctattctacctttaaaaggtaagatcctgaacgttgagcgtgcgcgctttgacaaaatgatctctagtcaggangtgggtacattaattacagcacttggctgtggtattggccgtgaagaatataaccctgacaagctccgttatcataaaattattattatgaccgatgccgatgtcgatggttcgcacatccgtacattgttattaacattcttcttccgtcaaatgccggagttggtggaacgtggtcatatttatattgcacagccacctttgtataagctcaaaaaaggtaagcaagagcaatatattaaagataacgacgcattagaaacttacttgatttcaaatgcgattgatgagcttgctttacatattagtgctgatgcgcctgcaattacaggtgaagcgctggcaaaagtaattcaagactatcaagtttcacaaaagagcttacaacgcttaacgttacgttatccagcaagcttactggatgcattactcgaagtcgacgcatttaaagcagatcagaaccatgatcaagcttatgtgcaacaatgggcagatcaagtacgtgaagctgtagagaagttgcaaccaagcttacgtccggaaattacgcttgaaacatttgaacgtgagaatgctcaaggcgagaaatctgcgcattattggccgcgtgtaactgtatatgttcataacttgccacatgcttacttacttgacgcaggtttattgaattctgcggaatatgctcgtttattgaagaactcgaagagttggttcaagttaattgaagatggcgcatacttacaaaaaggtgatcgtcgtattcaagtcgctaatttccatcaggtatggcagcacattctgcaagattcacgccgtggaatgatgatccagcgttataaaggtctgggtgagatgaatgctgagcagctttgggaaaccacaatggaccctgaaaaccgtaatatgttacaggtgactattgatgatgcaattgaagctgatcgtatgttctcatgcttaatgggcgatgatgttgaaccacgtcgtgcctttattgaagaaaatgcattaaatgcggatattgatgcttaa

SEQ ID NO: 7608 - protein, 822 aa, Acinetobacter baumannii
  misc_feature (479)..(479): Xaa can be any naturally occurring amino acid
MSSESQSASQTEQTNEKAYDSSSIKVLRGLDAVRKRPGMYIGDTDDGTGLHHMVFEVVDNAIDEALAGHCDEIIVTIHEDESVSVSDNGRGIPTDIHPEEGVSAAEVILTILHAGGKFDDNSYKVSGGLHGVGVSVVNALSSKLHLTIYRAGQIHEQEYHHGDPQYPLRVIGETDNTGTTVRFWPSAETFSQTIFNVEILARRLRELSFLNAGVRIVLRDERINLEHVYDYEGGLSEFVKYINEGKNHLNEIFHFTADADNGIAVEVALQWNDSYQENVRCFTNNIPQKDGGTHLAGFRAALTRGLNQYLENENILKKEKVNVTGDDAREGLTAIISVKVPDPKFSSQTKEKLVSSEVKPAVEQAMNKEFSAYLLENPQAAKSIAGKIIDAARARDAARKAREMTRRKSALDIAGLPGKLADCQEKDPALSELYLVEGDSAGGSAKQGRNRKMQAILPLKGKILNVERARFDKMISSQXVGTLITALGCGIGREEYNPDKLRYHKIIIMTDADVDGSHIRTLLLTFFFRQMPELVERGHIYIAQPPLYKLKKGKQEQYIKDNDALETYLISNAIDELALHISADAPAITGEALAKVIQDYQVSQKSLQRLTLRYPASLLDALLEVDAFKADQNHDQAYVQQWADQVREAVEKLQPSLRPEITLETFERENAQGEKSAHYWPRVTVYVHNLPHAYLLDAGLLNSAEYARLLKNSKSWFKLIEDGAYLQKGDRRIQVANFHQVWQHILQDSRRGMMIQRYKGLGEMNAEQLWETTMDPENRNMLQVTIDDAIEADRMFSCLMGDDVEPRRAFIEENALNADIDA

SEQ ID NO: 7609 - DNA, 975 bp, Acinetobacter baumannii
  misc_feature (146)..(146): n is a, c, g or t
atgttgaatgaatttgaacatgctcaggccgaaaacaaaagtcagctccgccaagatttactctaccaattggtaagtttatctaaaagtttgccttatccagcttcaggtcatacctatcagcgatggcaattatttgctcaaantgcagggtatgatttaagtctcgctaaattatttgagtcacatcatgatgctttaagtattctaaatgaattgggttatcaagacgaaatcgatgatcatacttgggcggtatgggcagcagagggtgggccggcacctatacaggtccagaacaatcattgtaatggtataaaaacctggtgctcaggtgcagagtttattcaaaaagccctaatgagttataaggacaaagaaggccaagcacaactttgtatcgttgatttggctcatccctctgttcatgttgacttgagccactggcaagcagtcggtatgcagggaacccaaacagctcaagtgcattttgacaatactcctgttattcctatcggactgccaaattgctatttggagcgtccgggtttttggcatggtgctgctggtgttgcggcttgttggtatggtgccgcggtacgcttggttagcttcttacataaaagttgcacccttaacccaaacgcatttaaaaaaatgtatttaggggagttggctcaacagctctctgtaaccaaacagtattttcaatatattgccaagctcattgatgatgagcctgcgctcagccatgagcgtgaaatccgtatattacgtgcccaaacagaacaatgctgccagagtgttattcaactcgttggtaaagctttgggcgcgcgtccttattgtgaagagcctacattttcacagctcatcgctgatttaccagtatttatccgacagagccatgcggcttttgattatgagtctattgctgagctctgtttaccggagaaaagcttatgggaactttga

SEQ ID NO: 7610 - protein, 324 aa, Acinetobacter baumannii
  misc_feature (49)..(49): Xaa can be any naturally occurring amino acid
MLNEFEHAQAENKSQLRQDLLYQLVSLSKSLPYPASGHTYQRWQLFAQXAGYDLSLAKLFESHHDALSILNELGYQDEIDDHTWAVWAAEGGPAPIQVQNNHCNGIKTWCSGAEFIQKALMSYKDKEGQAQLCIVDLAHPSVHVDLSHWQAVGMQGTQTAQVHFDNTPVIPIGLPNCYLERPGFWHGAAGVAACWYGAAVRLVSFLHKSCTLNPNAFKKMYLGELAQQLSVTKQYFQYIAKLIDDEPALSHEREIRILRAQTEQCCQSVIQLVGKALGARPYCEEPTFSQLIADLPVFIRQSHAAFDYESIAELCLPEKSLWEL

SEQ ID NO: 7611 - DNA, 906 bp, Acinetobacter baumannii
  misc_feature (727)..(727): n is a, c, g or t
atgaatagtattgttttatctctttttcctttagttgcattaattgcatcgggatacttatttaaaaaatatcgtttttttagcgatgagttttgggctggggcagagaagctgaattattatattttatttccagctttgctttttagtacgctatcgaccgcaaaaattgatttacaaagcttgagtacagccattattgcgatgttaattgtggttttagcagtgaccgcttttttatacatacttcgaatgttttggcacataccacccgcacgttttggtgtgcatgtacaaagtatggttcgctttaatacctatattggtttggctttagtcacttcgctttttaaaagtgaaggaatggcaattctggcaattttattggcgctttgcattccgcttgtgaatgttatttcggtgcttgctctaacctctaaagaacacatggcaattaaacctgttttgattgcactccttaaaaaccctttaattgcatcgtgtgtggtcggggcagcagtcaatgcactgcatatcccgatttgggaaggctttactcagtttattaagcttttttcagtgtcgagtttgccactaggtttgttatgtgttggcgcagctttgcagtttatgcaaattaaaaaagacattgtggtattagcggcagacacgtttgcacgacttttagcagtacctgctttagcttacgcggtctgtacgtggtttngtttaccaagcttgcaaacacaaattttagtcattttctttgcgctaccgactgcttctgcttcatacattttaaccaaagttttgggtggtgatagtcagcttatggcagccgtgattagctttcaaaccttatgtgctgccgtgactttgccattagtgatttggtggatttcttaa

SEQ ID NO: 7612 - protein, 301 aa, Acinetobacter baumannii
  misc_feature (243)..(243): Xaa can be any naturally occurring amino acid
MNSIVLSLFPLVALIASGYLFKKYRFFSDEFWAGAEKLNYYILFPALLFSTLSTAKIDLQSLSTAIIAMLIVVLAVTAFLYILRMFWHIPPARFGVHVQSMVRFNTYIGLALVTSLFKSEGMAILAILLALCIPLVNVISVLALTSKEHMAIKPVLIALLKNPLIASCVVGAAVNALHIPIWEGFTQFIKLFSVSSLPLGLLCVGAALQFMQIKKDIVVLAADTFARLLAVPALAYAVCTWFXLPSLQTQILVIFFALPTASASYILTKVLGGDSQLMAAVISFQTLCAAVTLPLVIWWIS

SEQ ID NO: 7613 - DNA, 1656 bp, Enterobacter cloacae complex
  misc_feature (1334)..(1334): n is a, c, g or t
atgaatacccttcctcactggtggcagaacggcgtcatctatcagatttacccaaagagtttccaggacaccaccggcagcggcacgggcgatctgcgcggcgtgacgcagcgcctggactacctgaaaaccctcggcattgacgccatctggctgacgccgttttatatctccccgcaggtggataacggttacgacgtggcgaactacactgccatcgatccgacctacggcacgctggacgactttgacgagctggttgcccgggcgcatgaacgcggcatccgcatcgtgctggatatggtctttaaccacacgtccacgcagcacgcctggttccgtgagtcgctggataaagcgagtccgtaccgccagttctatatctggcgcgacggtacgccggatacgcttcccaacaactggcgctccaaatttggcggcaacgcctggcgctggcacgccgaaagcgagcagtattatctgcacctgttcgcaccggagcaggcggatctcaactgggaaaacccggcggtgcgcgccgagctgaaaaaagtgtgcgagttctgggccgatcgcggcgtggacggcttgcgtctggacgtgattaacctgatttcaaaagatcaggatttcccggacgataccctcggcgacggtcgccgcttctacactgacgggccgcgcatccacgaatatcttcaggagatgagccgcgacgtctttacgccgcgtaatctgatgacggtgggcgagatgtcctccacctcgctggagaactgccaacagtacgcgtctcttgacggccgcgagctgtcgatgacctttaacttccaccacctcaaggtagactaccccggcggcgaaaaatggacgaaggcgaagccggacttcgtggcgctaaaaacccttttccgccactggcagcaggggatgcacaacaaagcctggaacgcgctgttctggtgtaaccatgaccagccgcgcatcgtgtcgcgctttggtgacgaaggggaacaccgcgtggcggcggcgaaaatgctcggcatggtgctgcacgggatgcagggcacgccgtatatctaccagggtgaagaactgggtatgaccaacccgcatttcagccgtatcaccgactaccgcgacgtggaaagcctgaacatgttcgccgaacagcgggctaacggtcgcgatacggatgaactactggcgattctggcgagtaagtcacgcgataatggccgcacgccgatgcagtgggacgcctcgcataatgcgggctttaccgaggccgagccgtggattggcgtctgcgacaactacgaaaccgtgaacgnccgcgcggcgctggacgaccccaattcggtgttttacacctatcagtcgctgattcgcctgcgcaaaaccttgtcggtactgacgtggggggattatgaggatctcctgcctgaccacccttccctgtggtgctaccgccgccagtggcagggacaaacgctgatggtggtggcgaacctgagccacgcgcgccagcagtggcagcccgtccccgtagagggagcatggcgggtggcactcagcaactatgaagaggttcccttccgacccgatacgttgctattgcgtccgtttgaagctatctggtgggtgcaggaataa

SEQ ID NO: 7614 - protein, 551 aa, Enterobacter cloacae complex
  misc_feature (445)..(445): Xaa can be any naturally occurring amino acid
MNTLPHWWQNGVIYQIYPKSFQDTTGSGTGDLRGVTQRLDYLKTLGIDAIWLTPFYISPQVDNGYDVANYTAIDPTYGTLDDFDELVARAHERGIRIVLDMVFNHTSTQHAWFRESLDKASPYRQFYIWRDGTPDTLPNNWRSKFGGNAWRWHAESEQYYLHLFAPEQADLNWENPAVRAELKKVCEFWADRGVDGLRLDVINLISKDQDFPDDTLGDGRRFYTDGPRIHEYLQEMSRDVFTPRNLMTVGEMSSTSLENCQQYASLDGRELSMTFNFHHLKVDYPGGEKWTKAKPDFVALKTLFRHWQQGMHNKAWNALFWCNHDQPRIVSRFGDEGEHRVAAAKMLGMVLHGMQGTPYIYQGEELGMTNPHFSRITDYRDVESLNMFAEQRANGRDTDELLAILASKSRDNGRTPMQWDASHNAGFTEAEPWIGVCDNYETVNXRAALDDPNSVFYTYQSLIRLRKTLSVLTWGDYEDLLPDHPSLWCYRRQWQGQTLMVVANLSHARQQWQPVPVEGAWRVALSNYEEVPFRPDTLLLRPFEAIWWVQE

SEQ ID NO: 7615 - DNA, 1872 bp, Enterobacter cloacae
  misc_feature (787)..(787): n is a, c, g or t
gtgccgcaccgtgaagagctggacaactgcgaagtgctggctgtccaccaactgaatattgcgtttcaggaagagcggcagttcatccccgcagtacagaatttatcgttttcgctcaggcgcggcgagacgctggcgattgttggcgaatcaggttccggtaaatccgttaccgcgctggcgctgatgcgtctgcttgagcagacgggcgggcaggtcaccagcgagcggatgctgttgcgccgtcgcaaccgtcaggttatcgatctcaacgagctcagtgcgtcccagatgcagggggtgcgcggggcagatattgcgatgatttttcaggagccgatgacctccctgaacccggtttttccggtgggcgagcagattgccgaatctatccgcctgcatcagggactgagcggtgatgaggcgctcaacgaagcaaaacggatgctggagctggtgcgtatccctgaggcgcacgcgattttgtcccgctatccgcatcagctttccggcggcatgcgccagcgggtgatgattgcgatggcgctgtcgtgccgtccggcggtgctcattgcggacgaacccaccacggcgctggatgtcaccattcaggcccagatcctgcaactgattaaggtgttgcagcaggagatggagatgggggtgattttcatcacccatgatatgggggtggtggcggatattgccgatcgggtgctggttatgcatcagggcaatgccgtggaaaccggcacggtggagcaggtctttcatgcgccggtgcatncttataccaaagcgctgctggcggcggtcccgcgtctgggggccatgaatggcagtgattttccgcgccgttttccgctgatctcacagaccgaacagggccagcaggaagacgaaaccgaacaggatacggtggttcccggcaggccaattctcgaagtgcgtgacctggtgacccgtttcccgctgcgtagcgggatcctcaatcgcgtgaagcgcgaagtgcatgcggttgaaaacgtcagttttgatctctggccgggcgaaacgctggcgctggtgggggagtccggctgcggtaaatccaccaccggacgggcgctgctcaggctggtggcgtcgcaggaggggagcatcaccttcaacggtgagcgcatcgacacgctccctaacagtaaattgcaggcggtgcgccgggatattcagtttatattccaggatccttatgcgtcgctcgatccgcgccatacggtggggtactcgattatggagccgctgcgggtgcataacctgctcgacggtgaagccgcgcagcgccgcgtcgcatggctgctggagcgcgtgggcctgaagtcggagcatgcctggcgttatccgcacgaattttctggcggtcagcgtcagcgtatctgcattgcgagggcattggccctcaatccgaaagtggtgattgcggatgagtccgtgtcagcgctggatgtctctatccgcgcgcaaattatcaatctcctgctcgatttacagcgggatttgggcattgcgtttctgtttatctcccacgatatggcggtggtggagcggatcagccatcgcgtggcggtgatgtacatggggcaaattgttgaaatcggcccccgtcgggcggtgtttgaaaacccgcagcacccttacacccgcaagctgatggctgccgtaccggttgccgatcctgagcatcgtcacgcccagcgcgtgctgttgcaggacgaaatgccgagcaatattcgtaaacggggcgaaaccctggagcgcgtggcgctgcgtgaggtgggacccggtcattttgtcgcaccaccgcgtcagggcaatgcattctcgcggttataa

SEQ ID NO: 7616 - protein, 623 aa, Enterobacter cloacae
  misc_feature (263)..(263): Xaa can be any naturally occurring amino acid
MPHREELDNCEVLAVHQLNIAFQEERQFIPAVQNLSFSLRRGETLAIVGESGSGKSVTALALMRLLEQTGGQVTSERMLLRRRNRQVIDLNELSASQMQGVRGADIAMIFQEPMTSLNPVFPVGEQIAESIRLHQGLSGDEALNEAKRMLELVRIPEAHAILSRYPHQLSGGMRQRVMIAMALSCRPAVLIADEPTTALDVTIQAQILQLIKVLQQEMEMGVIFITHDMGVVADIADRVLVMHQGNAVETGTVEQVFHAPVHXYTKALLAAVPRLGAMNGSDFPRRFPLISQTEQGQQEDETEQDTVVPGRPILEVRDLVTRFPLRSGILNRVKREVHAVENVSFDLWPGETLALVGESGCGKSTTGRALLRLVASQEGSITFNGERIDTLPNSKLQAVRRDIQFIFQDPYASLDPRHTVGYSIMEPLRVHNLLDGEAAQRRVAWLLERVGLKSEHAWRYPHEFSGGQRQRICIARALALNPKVVIADESVSALDVSIRAQIINLLLDLQRDLGIAFLFISHDMAVVERISHRVAVMYMGQIVEIGPRRAVFENPQHPYTRKLMAAVPVADPEHRHAQRVLLQDEMPSNIRKRGETLERVALREVGPGHFVAPPRQGNAFSRL

SEQ ID NO: 7617 - DNA, 1044 bp, Enterobacter cloacae
  misc_feature (869)..(869): n is a, c, g or t
atgagtgtgatgtttgatcccgaaaccgcaatctatcccttcccgccgaagcccgctccgctaagccgggatgaaaaacagttctatcgtgaaaaaattaagcgcctgcttaaagagcgtgatgcggtgatggtggcgcattactacaccgacccggaaattcagcagctggcagaagagacgggcggctgtatctcagactccctggaaatggcgcgtttcggtgcaaaacatcctgcctccacgctgctggttgcaggtgtgcgcttcatgggcgaaacggcaaaaattctcagcccggaaaaaaccatactgttgccgacgctgaatgccgaatgctcccttgacctcggttgcccgattgatgagttcaccgccttctgtgatgcccaccctgatcgtaccgtggtggtctatgccaacacgtctgcggcggtgaaagcccgggcagactgggtagtgacctccagtatcgccgttgagctgattgagcatctggacagcctgggggagaaaatcatctgggcgcccgatcgtcacctgggaaactatgtacaaaaacaaaccggtgcggatgtgctgtgctggcagggcgcctgtatcgttcacgacgagtttaagacccaggccctgacgcgcatgagagggttatacccagacgccgcgattctggtgcacccggaatccccgcagtccatcgtcgacatggcggatgccgtcgggtcaaccagccagctcattcatgctgcgaaaaccctgtcacacaagcagctcattgtggcgaccgatcgcggtatcttctacaagatgcagcaggccgtgccggaaaaaacgttgctcgaagcgccgaccgccggagaaggggcganctgccgaagctgcgcgcattgcccgtggatggcgatgaatgggctcaaagcgattgcggaggggctggaaaacggtggcgcagcgcatgagatccacgtggatgccgctctgcgtgaaggcgcgttaattccacttaaccgtatgctggattttgcggctacactacgtacttaa

SEQ ID NO: 7618 - protein, 347 aa, Enterobacter cloacae
  misc_feature (290)..(290): Xaa can be any naturally occurring amino acid
MSVMFDPETAIYPFPPKPAPLSRDEKQFYREKIKRLLKERDAVMVAHYYTDPEIQQLAEETGGCISDSLEMARFGAKHPASTLLVAGVRFMGETAKILSPEKTILLPTLNAECSLDLGCPIDEFTAFCDAHPDRTVVVYANTSAAVKARADWVVTSSIAVELIEHLDSLGEKIIWAPDRHLGNYVQKQTGADVLCWQGACIVHDEFKTQALTRMRGLYPDAAILVHPESPQSIVDMADAVGSTSQLIHAAKTLSHKQLIVATDRGIFYKMQQAVPEKTLLEAPTAGEGAXCRSCAHCPWMAMNGLKAIAEGLENGGAAHEIHVDAALREGALIPLNRMLDFAATLRT

SEQ ID NO: 7619 - DNA, 2610 bp, Enterobacter cloacae
  misc_feature (2436)..(2436): n is a, c, g or t
atggacgagctttacatccttggctgtttgttcctggtttttgcgctggtcgtggcacccgtgctcgcggtgataggttttaaccgaagcacggcggcgcggcaggagatcgcccggcttcgccagcgcattgaggcgcttgagcagcgcggtgtcactgagaaagcgccggagccggtgcagaccgccgcgccggtggagacgccagcgtcggtggcagaagccgttaccccacctgtcgatccctggcgtcccgaaccgcccgtcactgaagcagaaccagcgcttgtaccggcggcaaaacggccttccgcctttggcggcatcctgtcctcgctgacgcgctggtttatgcagggcaatccgctggcaaaactggggattgtactgctcttcctcggcctctctttcctgctgcgctataccgttgaacattcactgtttccgattgagctgcgtcttgccgccacggcgctgtttgccatggttctgctggccgttggatggcggctgcggcacaggcagcggatctacgcgctgatcctccagggcggggcgaccggcgtgctttatctgaccgtctttggcgcattccggctgtggcaaatgctgccgatgacgctggcgtttgcgctgctggtggtgatttgcgcggcgagcgtcgggctggccgtgctgcaaaaggcgctgagccttgccatgctggcgagcctcggcggataccttgcgccgctgctgttgtctaccggaggcggcagcgttgtggcgctgttctccttctatctcatgctttccatcggcattctcgccatcagcatctggcagcactggcgcgagctcaacctgctcgggctgctcttcacgtttggcgttggcggggtatgggggctgagcgactaccagcctgaagactatgctatctgtcagctgttcctgattgccaatacgcttatttttggcgtgtttagcgtggcgctgtcgctgcgggcgcaggaaaaaggcaaacagattattgacggcgcactgctgtttgctccgccgctgattggttttgggatgcagtatggcatgacgtctcactggacgtacggcccggcgctcagcgcgctgggctatggtgcgttttatctctcactggcgtttctcgcactgcgacgctatccgtctgtcgggcggccactggttatggcggcgctggcgatcggcggcgggtttgccacgcttgccataccgctggcgctttcagcgcgctggacggcgatggcctgggcgctggaagggttgggtattctctggctgggcgtgcaacagcagcagcggcgcatgagctatagcgggacggcgctgctggtgctggcgctcggcagcgcgatatgggcgcaaatggacggcgtcacctcgttgagcctgctgcttattttcgcagtgctcagtctttgctggctggctgcggcctggctgtggcagaaaatcgcacagccgggcagttgggcattgctggccggtgggctgctgttctggttagtggcgcagctgggcgcgtcgcagctgttcctgaagcaggagttatcggttctggaaggcgtaatggcgctgacggcggcgtcggcctggggatggcggcaggctgccgctcgtctggcgtggcgggagctggatgccagcaaatggctgctgtggccggtgatgctgctgatggtgctgtatcagatctggcaacagcaaatcctggcggccggctgggcaaatctggcctgggctattgcgctgcctgccgccctgatgctgctgcggcgcgacgaagataaacttctgccgcgcatctcaatgggactgcatctgtcgctggtgtggatgattttactcgccatagccgccgagctttactggtttgcccgctccctgccgtggggcatggcggcctggggaagcggcattgcgatggctgttggcggtggggtgattatggcgctctccgcggccgtacggcgtcgcgggtggccgttccgggtatggcctgcgctctacgcctgccttgccgcgatccctgtggttgtggcgctggtggtattgctggtcgtgaccaatttgcaggacggtgtggtctatcaacagacatggctgccgctggtgaacccgcttgaggaaggggcggcgttctcgctgctggggctggtggtgttttatcgggaagtggatcgctactatccggcatcgtttgcgcagtcccgtccgtggcccgccgttgtgctgatggccctgggtttctggtggcttaacggcgcattgctgcgcgcgctggcgtggtacggcgaggtggcctggaattgggagtcgttgtggcattcgcggcttatccagaccacctttgccctgttctggatgttgtgcgcgctggtggtcatgatccgcgccacccgtcacgcctcccggcancagtggcttggcggtgcggcgctactgggggtggtcatgctcaaactgatgctggtggacagcgcgggcggtggcggcctggcgcgcgccgtcgcgtttattggcgtggcgatcctggtcctgattgtgggctatttctcgccgctaccgcctaaggcaggagaagaaaaatga

SEQ ID NO: 7620 - protein, 869 aa, Enterobacter cloacae
  misc_feature (812)..(812): Xaa can be any naturally occurring amino acid
MDELYILGCLFLVFALVVAPVLAVIGFNRSTAARQEIARLRQRIEALEQRGVTEKAPEPVQTAAPVETPASVAEAVTPPVDPWRPEPPVTEAEPALVPAAKRPSAFGGILSSLTRWFMQGNPLAKLGIVLLFLGLSFLLRYTVEHSLFPIELRLAATALFAMVLLAVGWRLRHRQRIYALILQGGATGVLYLTVFGAFRLWQMLPMTLAFALLVVICAASVGLAVLQKALSLAMLASLGGYLAPLLLSTGGGSVVALFSFYLMLSIGILAISIWQHWRELNLLGLLFTFGVGGVWGLSDYQPEDYAICQLFLIANTLIFGVFSVALSLRAQEKGKQIIDGALLFAPPLIGFGMQYGMTSHWTYGPALSALGYGAFYLSLAFLALRRYPSVGRPLVMAALAIGGGFATLAIPLALSARWTAMAWALEGLGILWLGVQQQQRRMSYSGTALLVLALGSAIWAQMDGVTSLSLLLIFAVLSLCWLAAAWLWQKIAQPGSWALLAGGLLFWLVAQLGASQLFLKQELSVLEGVMALTAASAWGWRQAAARLAWRELDASKWLLWPVMLLMVLYQIWQQQILAAGWANLAWAIALPAALMLLRRDEDKLLPRISMGLHLSLVWMILLAIAAELYWFARSLPWGMAAWGSGIAMAVGGGVIMALSAAVRRRGWPFRVWPALYACLAAIPVVVALVVLLVVTNLQDGVVYQQTWLPLVNPLEEGAAFSLLGLVVFYREVDRYYPASFAQSRPWPAVVLMALGFWWLNGALLRALAWYGEVAWNWESLWHSRLIQTTFALFWMLCALVVMIRATRHASRXQWLGGAALLGVVMLKLMLVDSAGGGGLARAVAFIGVAILVLIVGYFSPLPPKAGEEK

SEQ ID NO: 7621 - DNA, 1341 bp, Citrobacter rodentium
  misc_feature (1306)..(1306): n is a, c, g or t
ttgagtacattaacgctagttttgacagcagtgggttccgtattgctgctgctgtttttagtgatgaaggcacgtatgcacgccttcgtggctttgatggtggtttctattggtgccggtctcttttccggcatgccgctcgacaaaatcgcggcgacgatggaaaaagggatgggcggcacgctcggcttcctggccattgtggtggcgctgggcgcgatgtttggcaagattttgcacgagacgggcgcggtcgatcagattgcggtcaagatgctgaaatccttcgggcacagccgtgcgcactacgcgattggtctggccggtctgatttgcgcgctgccgctgttctttgaagtggcggtggtgctgctgattagcgtggcgttctccatggcgcgccatactggtaccaacctcgtgaagctggtcattccgctgtttgcgggcgtggcggctgcggcagcgttcctgctgccggggcctgcgccgatgctgctggcctcccagatgcatgctgactttggctggatgatcctgattggcctgtgcgcggcaattccggggatgattatcgccggtccgctgtggggcaacttcatcagccgctacgttgagctgcacattccggatgacatcaccgagccgcacctgggcgagggcaaaatgccatccttcggcttcagtctgtcgctgatcctgctgccgctggtgctggtgggcctgaaaaccatcgctgcgcgctttgtgccggtggggtcaaccgcttacgaatggttcgaatttattggtcatccgttcaccgcgatcctggtggcgtgtctggtagcaatttacggcctggcgatgcgtcagggcatgccgaaagaccgcgtgatggagatctgtggtgccgcgctgcaaccggcggggattatcctgctggtgatcggggcgggcggcgtgtttaagcaggtgctggtggattccggcgttggtccggcgctgggcgaagcgctgaccgggatggggctgccgattgcggtcacctgtttcgtgctggccgcggcggtacgtatcattcagggctccgcgaccgtagcgtgcttaaccgccgtgggtctggtaatgccggtgattgaacagctgaactactccggtgcgcagatggcggcgctctctatctgtatcgcgggtggctcgattgtggtttctcacgttaacgacgcgggcttctggctgttcggtaaatttaccggcgcaaccgaagcgcaaaccctgaaaacctggacgctgatggaaaccatcctcggcacgacgggtgcgnttgtcgggatgattgcgtttacgctgctgagctaa

SEQ ID NO: 7622 - protein, 446 aa, Citrobacter rodentium
  misc_feature (436)..(436): Xaa can be any naturally occurring amino acid
MSTLTLVLTAVGSVLLLLFLVMKARMHAFVALMVVSIGAGLFSGMPLDKIAATMEKGMGGTLGFLAIVVALGAMFGKILHETGAVDQIAVKMLKSFGHSRAHYAIGLAGLICALPLFFEVAVVLLISVAFSMARHTGTNLVKLVIPLFAGVAAAAAFLLPGPAPMLLASQMHADFGWMILIGLCAAIPGMIIAGPLWGNFISRYVELHIPDDITEPHLGEGKMPSFGFSLSLILLPLVLVGLKTIAARFVPVGSTAYEWFEFIGHPFTAILVACLVAIYGLAMRQGMPKDRVMEICGAALQPAGIILLVIGAGGVFKQVLVDSGVGPALGEALTGMGLPIAVTCFVLAAAVRIIQGSATVACLTAVGLVMPVIEQLNYSGAQMAALSICIAGGSIVVSHVNDAGFWLFGKFTGATEAQTLKTWTLMETILGTTGAXVGMIAFTLLS

SEQ ID NO: 7623 - DNA, 762 bp, Enterobacter cloacae
  misc_feature (549)..(549): n is a, c, g or t
atgcaaatctcaactgaagttctgaacgtcttatctcgctgccgtgctgaagggaactttcttttcctggccgaccagctcgaccgcagcatttatgttaagacaaacaaagtgctcgaagccgccggtggcaaatggaaccgaaaagagcaggcacatatttttacggcggatgcagctgagcgtatcgagcaaatcattctgacaggttcggttgacatcccacgagatctgttcaatttcttccctacacctgagaatttagtcacagatatggttctacgcgctgaaccagctgccggggagcgtgtactggagccagagtttggtgatggccgcattctgaaagccttaaaactggcggctccggatgcattgattaccgggatcgaattgaacgatgagcgattccttgcagtgaagaacgatagtgtccttagcacaggagtcgagctggtgcataccgactttcttgggtaccagcccgatgaaacttttgatgttatcgttatgaatccaccattccttaaacgctctgacgttaaacangtcatgcatgccatcgcaatgctcgctaagcgaggtcgcttacaggccattctgtcagctggggtattgttccgggaagacacactgacaaaagcgctcagggagcgagtcaaacaacttggcggacaaatttcgcctcttccggatgatacatttagggagtccggaacaaaggtcaaaacagcccgccttgaaattgatcttcgccgctaa

SEQ ID NO: 7624 - protein, 253 aa, Enterobacter cloacae
  misc_feature (183)..(183): Xaa can be any naturally occurring amino acid
MQISTEVLNVLSRCRAEGNFLFLADQLDRSIYVKTNKVLEAAGGKWNRKEQAHIFTADAAERIEQIILTGSVDIPRDLFNFFPTPENLVTDMVLRAEPAAGERVLEPEFGDGRILKALKLAAPDALITGIELNDERFLAVKNDSVLSTGVELVHTDFLGYQPDETFDVIVMNPPFLKRSDVKXVMHAIAMLAKRGRLQAILSAGVLFREDTLTKALRERVKQLGGQISPLPDDTFRESGTKVKTARLEIDLRR

SEQ ID NO: 7625 - DNA, 162 bp, Citrobacter freundii
  misc_feature (14)..(14): n is a, c, g or t
atgtcggtaattcnatggtggttaacttatttctttaatgccgcttctgagtatttaatctccacccgacagatgtcgtgccgttttatcaaatcaacaaaccctggcctcttcctgaaactactctcctcttccgatctcttaagaaggaattacatttga

SEQ ID NO: 7626 - protein, 53 aa, Citrobacter freundii
  misc_feature (5)..(5): Xaa can be any naturally occurring amino acid
MSVIXWWLTYFFNAASEYLISTRQMSCRFIKSTNPGLFLKLLSSSDLLRRNYI

SEQ ID NO: 7627 - DNA, 159 bp, Citrobacter braakii
  misc_feature (5)..(5): n is a, c, g or t
atganagtcacccacaacggcaagcagtacaccgccaaaaagctcaacgataacgagtggcaactgacatcggtatcggcaccacgcgacaagctgactctgaatcgctggcagatgcatatcgctggcctcctaaaacaggttgaggtgaaggcatga

SEQ ID NO: 7628 - protein, 52 aa, Citrobacter braakii
  misc_feature (2)..(2): Xaa can be any naturally occurring amino acid
MXVTHNGKQYTAKKLNDNEWQLTSVSAPRDKLTLNRWQMHIAGLLKQVEVKA

SEQ ID NO: 7629 - DNA, 1221 bp, Escherichia coli
  misc_feature (878)..(878): n is a, c, g or t
atgtttaagtcttttttcccaaagccgggaacgttttttctctcggcctttgtttgggcattgattgccgttatcttctggcaagccggtgggggtgattgggtggcgcgtatcaccggcgcttccgggcagatcccgattagcgccgcgcgtttctggtcgttggatttcctgattttttacgcttactacattgtttgcgtaggactttttgcattgttctggtttatctatagcccgcaccgttggcaatactggtcaatactcggtactgcgctgattatctttgtcacctggtttttggtggaagtcggggttgccgtcaacgcctggtatgcgccgttctatgatctgattcaaacggcgctaagttcgccgcataaagtcaccatcgaacaattttaccgcgaagtgggcgtctttctggggattgcgctgatcgcggtggtgatcagtgtgctgaacaacttctttgtcagtcactacgtgttccgctggcgtacggcgatgaacgaatattacatggcgaactggcaacaactgcgtcatatcgaaggggccgcgcagcgtgtgcaggaagacaccatgcgttttgcttcaacgctggagaatatgggcgtcagctttatcaacgctatcatgacgttgatcgccttcctgccggtgctggtaacgctctccgcacatgtgccggagctgccgattgtcgggcacattccgtatggtctggtgattgccgctatcgtctggtcgctgatggggaccggattactggcagtggtagggatcaaactgccggggctggagtttaaaaaccagcgtgtagaggctgcctaccgtaaagagctggtttatggtgaagacgatgccacgcgcgngacgccgcctacggtacgcgagctttttagcgccgtacggaaaaactatttccgcctctattttcactatatgtatttcaatatcgcccgcattctctatttgcaggtcgataacgttttcggtttgttcttgctgtttccgtcaattgttgccggtacgattacactcggcctgatgacgcagattactaacgtttttggtcaggttcgcggtgctttccagtacctgattaactcatggaccacactggttgagttgatgtctatctacaaacgtctgcgcagctttgaacatgagctggatggtgacaaaattcaggaagtaacccataccttgagctaa

SEQ ID NO: 7630 - protein, 406 aa, Escherichia coli
  misc_feature (293)..(293): Xaa can be any naturally occurring amino acid
MFKSFFPKPGTFFLSAFVWALIAVIFWQAGGGDWVARITGASGQIPISAARFWSLDFLIFYAYYIVCVGLFALFWFIYSPHRWQYWSILGTALIIFVTWFLVEVGVAVNAWYAPFYDLIQTALSSPHKVTIEQFYREVGVFLGIALIAVVISVLNNFFVSHYVFRWRTAMNEYYMANWQQLRHIEGAAQRVQEDTMRFASTLENMGVSFINAIMTLIAFLPVLVTLSAHVPELPIVGHIPYGLVIAAIVWSLMGTGLLAVVGIKLPGLEFKNQRVEAAYRKELVYGEDDATRXTPPTVRELFSAVRKNYFRLYFHYMYFNIARILYLQVDNVFGLFLLFPSIVAGTITLGLMTQITNVFGQVRGAFQYLINSWTTLVELMSIYKRLRSFEHELDGDKIQEVTHTLS

SEQ ID NO: 7631 - DNA, 1053 bp, Klebsiella aerogenes
  misc_feature (348)..(348): n is a, c, g or t
atgaacagcgcctgggtaaaacatgccattagtgaaattaacgccgactatcagcgttccgccgatacgcacctgatccgcctggcgttgcctggttttccggggatccctatttatctgaaagatgagagtacgcatccaaccggtagcctcaagcaccgactggcgcgctcgctgtttctctatggcctgtgcaacggatggatcaaagaaggcaccacgattatcgaatcgtcttcgggttcgacggcggtctcagaagcctattttgctcgcctgctgggcctgccgtttattgccgtgatgccctcctgcacggcgaagcgtaaaatcgaacagattgatttntatggcggacgctgtcatttcgtcgacaacgcctgcgaaatctacgccgcttctgaaatgctggcgcgcgagttgaatggccactatatggatcagttcaccttcgccgagcgcgccaccgactggcgcggcaataacaatatcgccgacagcattttccgccagatgacccatgagccgtatccgcagccgtcgtggatcgtcatgagcgccggtaccggcggtacttctgcaaccattggccgctatattcgctgccagggttacgagacgcaactgatggtcgtcgacccgcagaattcggtgttcctcgattactggcaaagccgcgacgccagcctgcgcagcccggtcggcagcaagatcgaagggattggccgtccgcgcgtcgagccatcgttcattcctgacgtcgtcgatgagatgctgcgcgttccggatgccgccagcgtcgctaccgccctgtggctggaaaagcagcttggaagaaaagtcggcgcctccaccggtaccaatatgtggggcgtgctgcaactggccacgcgcatgcgcgatgaaggacgccagggttccatcgtcaccctgttgtgcgacagtggcgaacgttatctcgaaagctattacaacccgcagtgggtcgcggcaaatatcggcgatattagcccgtggcagacgcagattatgcaactgagcggcgcacaataa

SEQ ID NO: 7632 - protein, 350 aa, Klebsiella aerogenes
  misc_feature (116)..(116): Xaa can be any naturally occurring amino acid
MNSAWVKHAISEINADYQRSADTHLIRLALPGFPGIPIYLKDESTHPTGSLKHRLARSLFLYGLCNGWIKEGTTIIESSSGSTAVSEAYFARLLGLPFIAVMPSCTAKRKIEQIDXYGGRCHFVDNACEIYAASEMLARELNGHYMDQFTFAERATDWRGNNNIADSIFRQMTHEPYPQPSWIVMSAGTGGTSATIGRYIRCQGYETQLMVVDPQNSVFLDYWQSRDASLRSPVGSKIEGIGRPRVEPSFIPDVVDEMLRVPDAASVATALWLEKQLGRKVGASTGTNMWGVLQLATRMRDEGRQGSIVTLLCDSGERYLESYYNPQWVAANIGDISPWQTQIMQLSGAQ

SEQ ID NO: 7633 - DNA, 3528 bp, Klebsiella aerogenes
  misc_feature (658)..(658): n is a, c, g or t
atgattacgattgacggtaatggcgcggtcgcttcagtcgcgtttcgcacgagtgaagttatcgccatctacccgattacgcccagttcaacgatggcggagcaggctgacgcctggtctggcgatgggctgaaaaacgtgtggggcgatgtcccccgcgtggtcgaaatgcagtcggaagccggggctatcggcgccgtgcacggcgcgctgcagaccggcgccctttccacttcctttacgtcatcgcagggcctgctgctgatgatcccgacgctgtataaattggccggccagttgatgccatttgtcctgcacgtcgccgcccgcaccgtcgccacccacgcgctatcaattttcggcgatcattccgacgtgatggccgtgcgccagaccggctgcgcgatgctgtgtgccagcagcgtccaggaagcgcaagacttcgcgctgatctcccatatcgccacgctgcaaagccgggtgccgtttatccatttttttgatggtttccgcacctcgcacgaaatcaacaaaatcgcgccgctggcggatgacaccattcgttccctgctgccgcagaataaaatcgccgagcatcgccaacgcgcccttaacccggagcatccggtcattcgcggcacctccgccaatccggacncttatttccagtcccgtgaagcgaccaacccgtggtacgacgcggtatacgaacacgttgaaacggcgatgaatgatttcgccgccgccaccggtcgccagtacaaaccgttcgaattttatggtcacccgcaggcggaacgggtaattgtcatcatggggtccgctatcggcacctgtgaagaggtcgtggatgaactgctgagccgtggggaaaaagtcggcgtgctgaaagttcgcctctatcgcccgttctccgccacgcatctgctgcaggcgctaccggagagcgcccgcgcggttgccgtactggatcgcaccaaagaacctggcgcgcttgccgaaccgttgtatctcgacgtgatgaccgcgctggcggaagccttcaaccgcggcgagcgcgaaacgctaccacgtactatcggcggccgctatggtctctcgtccaaagagtttggcccggaatgcgtgctggccatctttaatgaattacaggccgcacagccaaaaccccgctttaccgtgggcatttatgatgatgtgactaacctttcgctgccgctggcggaaaatacgctaccggcggaagcgaagctggaagcgctgttttacggcctcggtagcgacggtagcgtctcggcgaccaagaacaatatcaagattattggcaactccacgccgtggttctcacaaggctattttgtctatgattcgaagaaggccggcggcctgaccgtctcgcacctacgcgtcagcgaaaaaccgatccgctcgtcgtatctgatctcgcaggccgatttcgtcggctgccaccaactgcagtttatcgataaatatcagatggtagagcggttgaagcccggcggcattttcctgctcaataccccctacagcgctgatgaggtatggtcccgcctgccccaggaagtacaggccgcgctgaatcaaaagcaggcgcgcttttatgtggttaacgcggcgaaaatcgcccgtgagtgcagccttggcgcgcgcatcaacaccgttatgcagatggcctttttccatttaacccaaatcctgccgggcgacagcgcgctggccgaactacagggtgcgattgccaaaagctacagcagcaaaggccaggagctggtggaacgcaactggcaggcgctggcgctggcccgcgaatcgctggcggaagtgccgctgcagccggttaacgccagcagccccaaccgtccgccagtggtctccgatgccgcgccggactttgtcaaaaccgtcaccgcggcgatgcttgccggccttggcgatgcgctgccggtctccgcgctgccgccagatggtacctggcccatgggcaccacccgttgggaaaaacgcaacattgccgaagagatcccgatctggaaggaagagctgtgtacccagtgcaaccactgcgtcgccgcctgtccgcattcggcgatccgcgccaaagtggtcgctccgcaagagatggaaaacgcgccagccagcctgcactcgctggatgtgaaatcccgcgatatgcgcgggcagaaatacgttctgcaggtcgcgccggaagattgcaccggctgcaacctgtgcgtcgaagtgtgcccggcgaaagatcgccagaatccggacatcaaggccatcaatatgatgtcgcgccttgagcacgttgaagaagagaaagtcaattacgactacttcctcaacctgccggaaatcgatcgcaccaaacttgagcgcattgatattcgcacctcgcagctaattagcccgctgtttgaatactctggcgcctgctcgggctgcggcgaaacgccgtatatcaaactgttgacccagttgtatggcgatcggatgttgattgccaacgccaccggctgttcgtccatttacggcggcaacctcccctcaacgccttataccactgacgctaacggccgtggtccggcgtgggccaactcgttgtttgaagataacgccgaattcggcctgggcttccgcttaaccgtcgaccaacaccgccagcgcgtgatgcggttgttgagcgaatttgccgataaacttccagccgaattgaacgccgcgctgcatacggaagcgtcgccggaagcgcgccgccaacaggtcgccgagctgcgtcaggcgctgacgggggtcgaaggggccgaagagctgctcaccgatgcggatgcgttagtcgagaaatcagtctggcttatcggcggtgatggctgggcctatgatattggctttggcggtcttgaccatgtgctgagcctgaccgaaaacgtcaatatcctggtgctcgatacgcaatgttactccaataccggtggtcaggcatcgaaggcgacgccgctcggcgcagtcaccaagtttggcgagcacggcaaacgtaaggcgcgcaaggatctcggcgtaagcatgatgatgtacggtcatgtttatgtggcgcagatttcactcggcgcacagcttaaccagacggtgaaggcgattcaggaggcggaagcctatccgggcccatcgttgattatcgcctatagcccatgcgaggagcacggctacgacctggcgctgagccacgaccagatgcgccagttgacggcaaccggcttctggccgctgtaccgcttcgacccgcgtcgcgccgatgaaggcaagctgccgctggcgctggactcgcgcccgccgtcggatgcgctggcggaaacgctgctcaacgagcaacgcttccgtcgtctgaacgcccagcagccggaagtggccgagcagttgtggaaggacgcggccgccgacctgcaaaaacgctatgacttcctggcccaactggcaggtaaagcggagaaaccgaccaccgaaagttaa

SEQ ID NO: 7634 - protein, 1175 aa, Klebsiella aerogenes
  misc_feature (220)..(220): Xaa can be any naturally occurring amino acid
MITIDGNGAVASVAFRTSEVIAIYPITPSSTMAEQADAWSGDGLKNVWGDVPRVVEMQSEAGAIGAVHGALQTGALSTSFTSSQGLLLMIPTLYKLAGQLMPFVLHVAARTVATHALSIFGDHSDVMAVRQTGCAMLCASSVQEAQDFALISHIATLQSRVPFIHFFDGFRTSHEINKIAPLADDTIRSLLPQNKIAEHRQRALNPEHPVIRGTSANPDXYFQSREATNPWYDAVYEHVETAMNDFAAATGRQYKPFEFYGHPQAERVIVIMGSAIGTCEEVVDELLSRGEKVGVLKVRLYRPFSATHLLQALPESARAVAVLDRTKEPGALAEPLYLDVMTALAEAFNRGERETLPRTIGGRYGLSSKEFGPECVLAIFNELQAAQPKPRFTVGIYDDVTNLSLPLAENTLPAEAKLEALFYGLGSDGSVSATKNNIKIIGNSTPWFSQGYFVYDSKKAGGLTVSHLRVSEKPIRSSYLISQADFVGCHQLQFIDKYQMVERLKPGGIFLLNTPYSADEVWSRLPQEVQAALNQKQARFYVVNAAKIARECSLGARINTVMQMAFFHLTQILPGDSALAELQGAIAKSYSSKGQELVERNWQALALARESLAEVPLQPVNASSPNRPPVVSDAAPDFVKTVTAAMLAGLGDALPVSALPPDGTWPMGTTRWEKRNIAEEIPIWKEELCTQCNHCVAACPHSAIRAKVVAPQEMENAPASLHSLDVKSRDMRGQKYVLQVAPEDCTGCNLCVEVCPAKDRQNPDIKAINMMSRLEHVEEEKVNYDYFLNLPEIDRTKLERIDIRTSQLISPLFEYSGACSGCGETPYIKLLTQLYGDRMLIANATGCSSIYGGNLPSTPYTTDANGRGPAWANSLFEDNAEFGLGFRLTVDQHRQRVMRLLSEFADKLPAELNAALHTEASPEARRQQVAELRQALTGVEGAEELLTDADALVEKSVWLIGGDGWAYDIGFGGLDHVLSLTENVNILVLDTQCYSNTGGQASKATPLGAVTKFGEHGKRKARKDLGVSMMMYGHVYVAQISLGAQLNQTVKAIQEAEAYPGPSLIIAYSPCEEHGYDLALSHDQMRQLTATGFWPLYRFDPRRADEGKLPLALDSRPPSDALAETLLNEQRFRRLNAQQPEVAEQLWKDAAADLQKRYDFLAQLAGKAEKPTTES

SEQ ID NO: 7635 - DNA, 1401 bp, Klebsiella oxytoca
  misc_feature (730)..(730): n is a, c, g or t
gtgaggttcaaaatttccctgaccacacgcctgagcctgattttttctgcggtgatgcttacggtatggtggttatcaagttttatcctgattagcaccctgaatggctatttcgataatcaggaccgcgattttctgacaggtaaacttcagctcaccgaagagtttcttaaaacagagacgttcaggaacaaaacggatattaagtcattatcagaaaaaataaacgatgcgatggtggggcacaatggcttatttatttctataaaaaacatggaaaatgaaaaaattgttgaactctatgccaaaaattctgttgttccagcggtcctgcttaataagtcgggtgatattctcgactatatgatccagacggaagaaaataacaccgtgtaccgcagtatctcgcggcgggttgccgtgacgccggaacagggtaaaagcaaacatgtcatcattacggttgccacggatactgggtatcacaccctgtttatggacaaactcagtacctggctgttctggttcaatatcggtctggtctttatttctgtttttctgggctggctgaccacacgtattggtctgaaaccgctacgggaaatgaccagtctggcttcctccatgaccgtacacagcctggatcagcgtctaaatcccgatctggctccgccggaaatctctgagaccatgcaggagttcaataatatgtttgatcgcctggaggggncattccggaaactgtcagatttctcgtctgacatcgcgcatgagctgcgcacaccagtcagtaatctgatgatgcagacgcagtttgcactggctaaggaaagggatgtttcgcattaccgcgaaattttattcgctaacctggaagaactgaaaaggttgtcacgaatgaccagtgacatgctttttctggcacgttcagagcatggtctgctgcggctggataaacatgatgtggatctggcagccgaactgaatgaattacgtgagttgttcgagcccctggcagacgaaacaggaaagacaatcacggttgaaggagagggcgttgttgccggagacagcgatatgctccgacgtgctttcagtaacctgctttccaatgcaatcaagtattctcccgataacacctgtacagcgatacaccttgagcgtgacagtgactgtgtgaacgtgatgattacgaatacgatgtccggccaggttcccgctaatctggaacgtttgtttgaccggttctatcgcgcagactcatcaaggttctacaacacggaaggcgcggggctgggattatcaattacaaggtcgatcattcatgctcacggcggcgagctgtcagcagaacagcaggggcgggaaattgtgttcagtgtgcgtctgttaatggattaa

SEQ ID NO: 7636 - protein, 466 aa, Klebsiella oxytoca
  misc_feature (244)..(244): Xaa can be any naturally occurring amino acid
MRFKISLTTRLSLIFSAVMLTVWWLSSFILISTLNGYFDNQDRDFLTGKLQLTEEFLKTETFRNKTDIKSLSEKINDAMVGHNGLFISIKNMENEKIVELYAKNSVVPAVLLNKSGDILDYMIQTEENNTVYRSISRRVAVTPEQGKSKHVIITVATDTGYHTLFMDKLSTWLFWFNIGLVFISVFLGWLTTRIGLKPLREMTSLASSMTVHSLDQRLNPDLAPPEISETMQEFNNMFDRLEGXFRKLSDFSSDIAHELRTPVSNLMMQTQFALAKERDVSHYREILFANLEELKRLSRMTSDMLFLARSEHGLLRLDKHDVDLAAELNELRELFEPLADETGKTITVEGEGVVAGDSDMLRRAFSNLLSNAIKYSPDNTCTAIHLERDSDCVNVMITNTMSGQVPANLERLFDRFYRADSSRFYNTEGAGLGLSITRSIIHAHGGELSAEQQGREIVFSVRLLMD

SEQ ID NO: 7637 - DNA, 1182 bp, Enterobacter cloacae
  misc_feature (599)..(599): n is a, c, g or t
atggaaaaccgtagcgccgctctcccccgacgcgggttcgatgtcacctcttccgccttcttaatcgtcgcctttctgacgggcattgccggggcgctgcaaaccccgaccctgagcctgtttctgaccaacgaagtgcacgtccgcccggcgatggtcggtttcttttttaccggcagcgcggttattggcattctggtcagtcagttcctcgccggccgctccgaccgtcagggcgatcgcaagcagctgattgtcgtctgctgtctgctgggggtgctggcctgcgtactctttgcctggaaccgcaactatttcattttgctgttcatcggcgtttttctcagcagctttggatcgaccgccaacccgcagatgtttgccctcgcgcgggagcatgccgacaggaccggccgcgaagcggtgatgttcagctccattttacgtgcccaggtctccctggcatgggtgattggtcccccgctggcctacgccctggcgatgggatttggttttaccgcgatgtatctcagcgccgcggcggcgtttatcgtctgcgggatcatggtctggctattcttgcccagcatgcgcaaagnaaagccggtagcgaccggccggctggaagctccgcgcacgcaccgccgcgatgcgttgctgctgttcagcatctgcaccctgatgtggggtactaacagcctgtacatcattaacatgccgctgtttatcattaacgagctgcatctgccggagaagctggcggggctgatgatgggcaccgccgccggactggaaattccgaccatgctgattgccggttactacgcccggcgtttcggcaaacgctttctgatgcgtctttctgcagtggccggggtgctgttttacgtcggcatgctgacggtgcatacgccagcgctgctgctggcgatgcaggtgctgaacgccatctatatcgggatcctcgccgggatcggcatgctctatttccaggacctgatgccggggcaggcgggcgcggccaccaccctctataccaatactacccgcgtcggctggatcatcgccggttcactggcgggggtagtggcggagatctggagctatcacgcggtgttctggattgcgctggcgatgggcgttgtcactcaggcctgcctgtggcggataagagacgtgtaa

SEQ ID NO: 7638 - protein, 393 aa, Enterobacter cloacae
  misc_feature (200)..(200): Xaa can be any naturally occurring amino acid
MENRSAALPRRGFDVTSSAFLIVAFLTGIAGALQTPTLSLFLTNEVHVRPAMVGFFFTGSAVIGILVSQFLAGRSDRQGDRKQLIVVCCLLGVLACVLFAWNRNYFILLFIGVFLSSFGSTANPQMFALAREHADRTGREAVMFSSILRAQVSLAWVIGPPLAYALAMGFGFTAMYLSAAAAFIVCGIMVWLFLPSMRKXKPVATGRLEAPRTHRRDALLLFSICTLMWGTNSLYIINMPLFIINELHLPEKLAGLMMGTAAGLEIPTMLIAGYYARRFGKRFLMRLSAVAGVLFYVGMLTVHTPALLLAMQVLNAIYIGILAGIGMLYFQDLMPGQAGAATTLYTNTTRVGWIIAGSLAGVVAEIWSYHAVFWIALAMGVVTQACLWRIRDV

SEQ ID NO: 7639 - DNA, 2706 bp, Klebsiella pneumoniae
  misc_feature (2246)..(2246): n is a, c, g or t
atgcttatcaaaatgttaaccaaggttttcggcagccgtaacgaccgtacgctgcgtcgtatgcgcaaagtcgtcaatatcatcaacggcatggaaccggcgatggaaaaactctctgatgacgagctgaaagcgaaaaccgctgaattccgcgcgcgcctggaaaaaggcgaaacgctggaaagcctgatccctgaagctttcgccgtcgttcgcgaagccagtaagcgcgtattcggcatgcgccacttcgacgtccagctgctgggcggtatggtgcttaacgatcgctgcatcgccgagatgcgtaccggtgaaggtaaaaccctgaccgcgaccctgccggcgtacctcaacgcgctaaccggcaaaggcgttcacgtagtgaccgtcaacgactatctggcccagcgtgacgccgaaaataaccgcccgctgtttgaattcctgggcatgacagttggcatcaacatgtccggcctgccggcgccggcgaagcgtgaagcttacgctgccgatatcacctatggcaccaacaacgaatacggcttcgactacctgcgcgacaacatggccttcagcccggaagagcgcgttcagcgtaaattgcactatgcgctggtggatgaggtggactccatcctgatcgatgaggcgcgtacgccgctgatcatttccggcccggcggaagacagctctgaaatgtaccgcaaggtaaacaaaatcatcccgcatctgatccgccaggaaaaagaggattcggatactttcactggcgaaggccacttctcggtggatgaaaaagcgcgtcaggttaacctgaccgaacgtggtctggtgctgattgaagagctgctggtacaggaaggtattatggatgaaggtgagtccctgtactctccaaccaacattatgctgatgcaccacgttaccgccgcgctgcgcgcccatgcgctgttcacccgcgacgttgactacattgtcaaagatggcgaagttatcatcgtcgatgagcacactggccgtacgatgcagggccgccgctggtccgatggtctgcaccaggccgttgaggccaaagagggcgtggagatccaaaacgagaaccagactctggcctctatcaccttccagaactacttccgtctgtacgagaagctggcggggatgaccggtacagccgataccgaagcctttgaattcagctctatctataagctggataccgtggttgtaccgaccaaccgtccgatgatccgtaaagacatggcggatctggtctatatgaccgaagcggaaaaaattcaggctattatcgaagatatcaaaactcgtaccgctgccggtcagccggtgctggtggggactatctcgatcgaaaaatctgaagtggtttcccgcgaactgactaaagctggcatcaagcacaacgtcctgaacgccaaattccacgccagcgaggcggatatcgtcgcccaggcgggctacccttccgcggtgaccatcgctaccaacatggcgggtcgtggtaccgatattatgctcggcggtagctggcaggcggaagtcgctgcgctggaaaacccaacgccagagcagattgagaaaatcaaagccgactggcaggtacgccacgatgcggtactggccgcaggcggtctgcacatcatcggtaccgagcgtcatgaatctcgccgtatcgataaccagctgcgcggccgtgctggtcgtcagggggatgccggttcttcccgcttctacctgtcaatggaagatgccctgatgcgtatcttcgcctccgatcgcgtgtctggcatgatgcgtaaactgggaatgaaaccaggtgaggcgattgagcacccgtgggtcaccaaggcgatcgccaacgcccagcgtaaagtggaaagccgtaacttcgatatccgtaagcagctgctggaatatgatgatgtggccaacgaccagcgccgggcgatctacacccagcgtaacgagctgctggacgtgtctgacgtcagcgaaaccatcaacagcatccgcgaagacgtctttaaggcgacgatcgatgcccatattccgccgcagtcgctggaggagatgtgggatatcgaaggtctgcaggagcgtctgaaaaacgacttcgacctcgacctgccaatcaaagagtggctggataaagagccggagctgcatgaagagaccctgcgcgaacgtattctgcagagcgcggtagaaacctaccagcntaaagaagaagtggtcggcgccgagatgatgcgccacttcgagaaaggcgtgatgctgcagactctggattcgctgtggaaagagcacctggcggcgatggattacctgcgccagggtatccacctgcgcggctatgcgcagaaagatccgaagcaggagtacaagcgcgaatcgttctcaatgtttgccgcgatgctggagtcactgaagtatgaagtgatcagcaccctgagcaaagtccaggtgcggatgccggaagaagtcgaggcgatggaacagcagcgtcgtgaagaggccgagcgcctggcgcagatgcagcagctcagccatcagagcgatgatgaagccgcagcccaggatctggcggcgcaaaccggcgaacgtaaagtgggccgtaacgatccgtgcccgtgcggctccggcaaaaagtacaaacagtgccacggccgtctgagctaa

SEQ ID NO: 7640 - protein, 901 aa, Klebsiella pneumoniae
  misc_feature (749)..(749): Xaa can be any naturally occurring amino acid
MLIKMLTKVFGSRNDRTLRRMRKVVNIINGMEPAMEKLSDDELKAKTAEFRARLEKGETLESLIPEAFAVVREASKRVFGMRHFDVQLLGGMVLNDRCIAEMRTGEGKTLTATLPAYLNALTGKGVHVVTVNDYLAQRDAENNRPLFEFLGMTVGINMSGLPAPAKREAYAADITYGTNNEYGFDYLRDNMAFSPEERVQRKLHYALVDEVDSILIDEARTPLIISGPAEDSSEMYRKVNKIIPHLIRQEKEDSDTFTGEGHFSVDEKARQVNLTERGLVLIEELLVQEGIMDEGESLYSPTNIMLMHHVTAALRAHALFTRDVDYIVKDGEVIIVDEHTGRTMQGRRWSDGLHQAVEAKEGVEIQNENQTLASITFQNYFRLYEKLAGMTGTADTEAFEFSSIYKLDTVVVPTNRPMIRKDMADLVYMTEAEKIQAIIEDIKTRTAAGQPVLVGTISIEKSEVVSRELTKAGIKHNVLNAKFHASEADIVAQAGYPSAVTIATNMAGRGTDIMLGGSWQAEVAALENPTPEQIEKIKADWQVRHDAVLAAGGLHIIGTERHESRRIDNQLRGRAGRQGDAGSSRFYLSMEDALMRIFASDRVSGMMRKLGMKPGEAIEHPWVTKAIANAQRKVESRNFDIRKQLLEYDDVANDQRRAIYTQRNELLDVSDVSETINSIREDVFKATIDAHIPPQSLEEMWDIEGLQERLKNDFDLDLPIKEWLDKEPELHEETLRERILQSAVETYQXKEEVVGAEMMRHFEKGVMLQTLDSLWKEHLAAMDYLRQGIHLRGYAQKDPKQEYKRESFSMFAAMLESLKYEVISTLSKVQVRMPEEVEAMEQQRREEAERLAQMQQLSHQSDDEAAAQDLAAQTGERKVGRNDPCPCGSGKKYKQCHGRLS

SEQ ID NO: 7641 - DNA, 1194 bp, Klebsiella pneumoniae
  misc_feature (589)..(589): n is a, c, g or t
atgaacaaaaacagagggttaacgcctctggcggtcgttctgatgctctcaggcagcttagcgctaacaggatgtgacgataaaccggctcaacagggagcccagcacatgccggaagtcggtattgtgacgctcaaatccgcacctctacaaataaccaccgaactgccaggccgcaccagcgcctatcgcattgcggaagtccgtcctcaggtcagtggcattattttaaaacgtaacttcgtggaaggtagcgatatccaggccggcgtctccctgtatcagatcgatccagccacctatcaggccagctatgacagcgccaaaggcgacctggcaaaagcccaggcggcggcaaacatggatcaactgacggtcaagcgttatcagaaactgttgggcaccaaatatattagtcaacaagactacgataccgccgttgcgacggcgcagcagagcaatgcggccgtggtcgcggcgaaagcggccgttgaaaccgcgcgcatcaatctggcctacaccaaagtcacctcgccgatcagcggccggattggtaaatccaccgtgaccgaaggggcgctggtacagnatggtcaaacgaccgccctggcaaccgttcagcagctggatccgatctatgttgacgtcacccagtcgagcaatgatttcctgcgcctgaagcaggagctagccgacggccgcctgaaacaggaaaacggcaaagcgaaagtggagctagtgactaatgacggtcttaagtatccgcagtccggcacgctggaattctcggatgtcaccgtcgatcagaccaccggctcaatcacgctacgcgctattttcccgaacccggatcacaccctgctaccggggatgttcgtccgtgcccgtctggaagaagggattaaccctgacgccctgctggtaccgcaacagggtgttacccgtacgccgcgcggcgacgccagcgtcatggtagtgggggaaggcgataaagtcgaagtccgccaggtcactgcttctcaggcgatcggcgataaatggctggtcactgacggtctgaaatccggcgatcgcgttatcgtcaccggcctgcaaaaaatcaaaccaggtgtgcaggtaaaagcgcaggaagtagcttctgatgataaacagcaagccgcaggcaacgcgccatcagaacaaaccaagtcttaa

SEQ ID NO: 7642 - protein, 397 aa, Klebsiella pneumoniae
  misc_feature (197)..(197): Xaa can be any naturally occurring amino acid
MNKNRGLTPLAVVLMLSGSLALTGCDDKPAQQGAQHMPEVGIVTLKSAPLQITTELPGRTSAYRIAEVRPQVSGIILKRNFVEGSDIQAGVSLYQIDPATYQASYDSAKGDLAKAQAAANMDQLTVKRYQKLLGTKYISQQDYDTAVATAQQSNAAVVAAKAAVETARINLAYTKVTSPISGRIGKSTVTEGALVQXGQTTALATVQQLDPIYVDVTQSSNDFLRLKQELADGRLKQENGKAKVELVTNDGLKYPQSGTLEFSDVTVDQTTGSITLRAIFPNPDHTLLPGMFVRARLEEGINPDALLVPQQGVTRTPRGDASVMVVGEGDKVEVRQVTASQAIGDKWLVTDGLKSGDRVIVTGLQKIKPGVQVKAQEVASDDKQQAAGNAPSEQTKS

SEQ ID NO: 7643 - DNA, 918 bp, Enterobacter cloacae
  misc_feature (643)..(643): n is a, c, g or t
atggacagcctcacctcgctgacgtcctttgtccgcaccgccgaaacgctaagctttgttcaggccgccaggctgctgggcatatctgcctcggcggtgggtaagaatgtcgcccggcttgagcataaactgggggtccggctgttcaaccgcagcaccagaaacgtcagcctgacggcggagggggccgcatttctgacccgctgtcagagtatcctggagcagatccaggaggccgagtcagagctgaccagcagtctctcacagcccaccggcaaactgaggatttcactgcccgtcattggctaccgcctgttgctccccgccctcaccgcctttagccgtctttatccgcaggttgaactggatctcgactttagcgaccggctggtcaatctgatcgatgagggagttgatgtcgctatccgcagcggtgaattagcggactcccgcttgatcgccagaaagctgggaggttttcgttttgtgctctgcgccagtccgacctatctggcggaatacggcgttcccggctcaccagcggaattggcggcacacaagtgcatttttttccgcttccccgcgacggggctgatccagccctgggaactgcgcggtatgcgactgacgggagatttcaggnccgctgccgtgatgacggtcaataacattgaggccgccattcgcttaagcgcggcggggatgggcatcgcttatgtgcctgattttgtcgtgcgcgaggcaatggatgagggacaactgcaggaggtgttgcccggctgttgcgtcaaggatgggcatttctcggtcctgtggcccgccagccgctacctgtcaccaagaatacgctgttttatcgattttatagctgcggcagagatacctttgtcgcccgcatcggcaagccctaccacctga

SEQ ID NO: 7644 - protein, 305 aa, Enterobacter cloacae
  misc_feature (215)..(215): Xaa can be any naturally occurring amino acid
MDSLTSLTSFVRTAETLSFVQAARLLGISASAVGKNVARLEHKLGVRLFNRSTRNVSLTAEGAAFLTRCQSILEQIQEAESELTSSLSQPTGKLRISLPVIGYRLLLPALTAFSRLYPQVELDLDFSDRLVNLIDEGVDVAIRSGELADSRLIARKLGGFRFVLCASPTYLAEYGVPGSPAELAAHKCIFFRFPATGLIQPWELRGMRLTGDFRXAAVMTVNNIEAAIRLSAAGMGIAYVPDFVVREAMDEGQLQEVLPGCCVKDGHFSVLWPASRYLSPRIRCFIDFIAAAEIPLSPASASPTT

SEQ ID NO: 7645 - DNA, 831 bp, Citrobacter braakii
  misc_feature (667)..(667): n is a, c, g or t
atgaatccctacagatatgatattcagacgctggagcgtaaagcccgcgcggtgcggcgccatattgtgcgcttaaacgccaatagtccggccggcggccacaccggggctgacctttcgcaggtcgaactgttaaccgcgctctatttccgcgtccttaacgtcgcgccggaccggctcgacgacccgcagcgcgatatctacatccagtcgaaaggccacgccgtgggctgctactactgcgtcctggcggaagccggcttcttcccggtcgagtggctggagacctaccagcatgccaattcccatctccccggccacccggtgcggcaaaaaacgccgggcatcgagctcaacaccggcgcgctgggccacggtttgcctgttgcggtggggctggcgctggccgcgaagaaaagcaacagcacccgccgcatttttttgatcaccggcgacggcgaactggcggaaggcagtaactgggaagccgccctggcggctgcacattacggcctggataatctggtcattattaatgataagaacaacctccagctggccgggccgacgcgcgaaatcatgaataccgatccgctggccgataaatggcgcgccttcggtatggaagtcagcgaatgccagggtaacgacatggcctcggtggtcncggtcatcgaggggttgaagcaggaaggtaaacccaacgttattattgccaacaccacgaaaggtgccggtatttcctttatccaggggcgcccggagtggcaccaccgggtgccgaaaggcgaagaaattgcactggcactggaggaactgaaagatgagtaa

SEQ ID NO: 7646 - protein, 276 aa, Citrobacter braakii
  misc_feature (223)..(223): Xaa can be any naturally occurring amino acid
MNPYRYDIQTLERKARAVRRHIVRLNANSPAGGHTGADLSQVELLTALYFRVLNVAPDRLDDPQRDIYIQSKGHAVGCYYCVLAEAGFFPVEWLETYQHANSHLPGHPVRQKTPGIELNTGALGHGLPVAVGLALAAKKSNSTRRIFLITGDGELAEGSNWEAALAAAHYGLDNLVIINDKNNLQLAGPTREIMNTDPLADKWRAFGMEVSECQGNDMASVVXVIEGLKQEGKPNVIIANTTKGAGISFIQGRPEWHHRVPKGEEIALALEELKDE

SEQ ID NO: 7647 - DNA, 1320 bp, Enterobacter cloacae
  misc_feature (71)..(71): n is a, c, g or t
atgatggttctccgaatgaaagcctgtcctcagcatagtactgggaaggagggagtgaccatctcattaantattatgtctgaaaactccaccttttctcccgtcctcaccggccgggaacgtacggctgtccctgcaaaatctctgagcttcgtcgaaggggtatcgatgattgtcggtaccaatattggcgcgggcgtcctctctatcgcctatgcgtcgagcaaagcgggcttcttaccgctgctgttctggctggtgctggtgggcagcctgacgacggtgactatgctctatgtcgcggaatccacgctgcgcacccgtaaacatctgcagctcagtggattatcgaagcgctacgtcggcggctttggcgcgctgatgatgtttctctccgtctgcgtcaatagcgtcggggcattgacggcgtatatgaccggcagcggtaagctgctgcactccctgtttggcatctcgccggcgctgggcagcgtgctgtttttcgttccggcggcaggggtactctacctggggctgaaggcgatcggccgcggtgagaaatttatcagcatcggcatggtggtgatgatctcggtgctggtgattgccacgctgttgaaagataccacccgcgtcggctatctgctcgacggcaactggctgtatatggttccggtcttcaacgtcgtggcattctgcttctcggcacagtatatcgtgccggagatggcgcggggcttcgccgacaaaccggaaaaattgcctaaagccatcatggtcggtatggcgctgacctttaccctgctggcgctggtgccgttgtcggtgatctcgcttaacggtctcgacaatatctcggatgtggccaccatctcctgggggcgggcgcttggcgaatgggccttcttctcagccaatctgtttgcgctgtgcgcgatgctgacctcctactggggactgggcggcagcttcctgaccaatatcttcgatcagttccgcctggggaatgacgaacagcccgcccggcgcctgatggtgctgctggtggtggcgatcccgccgttcgtactggcctatagcggcatggtctccttcgtcaacgcgctctattttgccggggtgttcagcggcgtcattttatcgattatgccgatcctgatgctcaagggcgcccgccagcgtggcgatctgaccccgggctggacctgtccggcctggatgacccatccgcttatccaatgcttcattgtgttgttgtatctttgcagcgccgcctacgcgatagcatccgcggtgggctacctacccgcaggctggtaa

SEQ ID NO: 7648 - protein, 439 aa, Enterobacter cloacae
  misc_feature (24)..(24): Xaa can be any naturally occurring amino acid
MMVLRMKACPQHSTGKEGVTISLXIMSENSTFSPVLTGRERTAVPAKSLSFVEGVSMIVGTNIGAGVLSIAYASSKAGFLPLLFWLVLVGSLTTVTMLYVAESTLRTRKHLQLSGLSKRYVGGFGALMMFLSVCVNSVGALTAYMTGSGKLLHSLFGISPALGSVLFFVPAAGVLYLGLKAIGRGEKFISIGMVVMISVLVIATLLKDTTRVGYLLDGNWLYMVPVFNVVAFCFSAQYIVPEMARGFADKPEKLPKAIMVGMALTFTLLALVPLSVISLNGLDNISDVATISWGRALGEWAFFSANLFALCAMLTSYWGLGGSFLTNIFDQFRLGNDEQPARRLMVLLVVAIPPFVLAYSGMVSFVNALYFAGVFSGVILSIMPILMLKGARQRGDLTPGWTCPAWMTHPLIQCFIVLLYLCSAAYAIASAVGYLPAGW

SEQ ID NO: 7649 - DNA, 2385 bp, Klebsiella pneumoniae
  misc_feature (715)..(715): n is a, c, g or t
gtgagtcatcacgaagttgaaaagcacggcggagcagaagattccgccgctgcttttgcctggaatttacctaaaaaggcgattaacccctatctggacccggcagaagtagcgccggtttctgcgctttcaaacctgattactctctatgctgcggataacgagcaggaacagctgcgccgcgaggctctgagtaatgaggtctgggaccgctatttcttcaatgaatcccgtgatcctgttcagcgggaaatggagcaggaccggctgatcagccgtgccaaaatggcccgcgagcagcagcggtttaatcccgatctggtgattctggcggacgtaagcgctgaaacatcacatatcagcaagccactgcttgagcgcattaaatatttcgagggcctgggcaagccgaaggcatattcccgctatctacgtgaaaccatcaggccgtgccttgaacgcctggagcgcgtgcgtaccagccaggtttctgcgtcattccgttttatggcgagccacgacgggctggagggcctgctggttctgcctgaaatgaaccaggatcaggttaagcggttatctaccttggtggcggcacacatgagcatgtgtctggatgctgcctgcggtgagctgttttcggatgaagacgttacgccggaagagatccgccggtcatgggaaagggtggcggctgaggccatgcgccttgatnttatcccgcctgctttcgagcagctgcgccgtaaaaagcaccgccgtaacccggtcccatacgaacttattccgggttcgcttgcccgtatgctctgtgctgactggtggtatcgcaagctgtggcagatgcggtgtgaatggcgggaagaacagctgcgcgccgtctgcctggttaacaaaaaggcgtccccgtatgtcagctatgaggccgtgatccataaacgcgaacagcgccgcaaatcgctggagttcttccgctcgcatgagctgaccaatgagcagggcgatacgctggatatggaagacgtggtaaacgccagcagcagcaatccggcgcaccggcgcaacgaaatgatggcctgcgttaaagggctggagctgatcgcagaaatgcgtggtgaatgcgccgtgttctataccatcacctgtccgtcacgctttcacgcaacgctcaataacggcaggccaaacccaaaatggaccagtgccacggtccggcagagcagcgattatctggtgcatatgttcgccgccttccgtaaggcgatgcacaaagccgggctgcgctggtatggcgtccgcgttgctgagccacaccatgacggcaccgtgcactggcacctgctttgcttcatgcgcaaaaaagaccgcaagtccatcactgcactgctgcgtaaatttgccatccgtgaggaccgcgaggagctgggcaacaataccggcccgcgttttaagtctgagctgatcaacccgcgcaagggtacgccgaccagctacatcgcgaagtacatcagtaagaacatcgacgggcgtggcctggctaacgaaatcagcaaagaaaccggcagatcactgcgggacaatgccgaacatgtcaatgcctgggcctcgctgcatcgcgtccagcaattccgcttttttggtattccggggcgtcaggcataccgtgagctgcgtttgctggcaggccaggccgcgcgacagcaggccgataaaaaagccggagcgccggtactggataacccgcgtctggatgccgtgctggcggcagccgatgccgggtgttttgccacctacatcatgaaacagggcggcgtactggttccgcgtaaacatcacctggtccgcacggcttatgaactcaatgacgagccatcagcctatggcgatcacggcatccgtatttatggcatctggtccccgattattgagggacggatttgcacgcatgcgatgaagtggaaaatggttcgtaaggccgttgacgttcaggaggcgccagccgaccagggcgcttgcgccccttggactcgtggcaataactgtccccctgtggaaaaaatgaactattttgagtcggatttatcaggtgaaaaacagctggaaccgctgccggacttcaatagtatgagccgaaaagagctacgggagctaaatgcgaggctgcgacaggtaagaccgaagcggcggaagggttacaaacaggaaattaacgatcggctgcgcctgcagcttgaacatgagttgaagtccagagggtttgacggcagcgagaatgagatcgatctactgctgcgtggtggcagcattccatcgggggccgggctgcggcttttttaccgcaatcagcggctgcaggaagatgacaaatggcggcagtggtactga

SEQ ID NO: 7650 - protein, 794 aa, Klebsiella pneumoniae
  misc_feature (239)..(239): Xaa can be any naturally occurring amino acid
MSHHEVEKHGGAEDSAAAFAWNLPKKAINPYLDPAEVAPVSALSNLITLYAADNEQEQLRREALSNEVWDRYFFNESRDPVQREMEQDRLISRAKMAREQQRFNPDLVILADVSAETSHISKPLLERIKYFEGLGKPKAYSRYLRETIRPCLERLERVRTSQVSASFRFMASHDGLEGLLVLPEMNQDQVKRLSTLVAAHMSMCLDAACGELFSDEDVTPEEIRRSWERVAAEAMRLDXIPPAFEQLRRKKHRRNPVPYELIPGSLARMLCADWWYRKLWQMRCEWREEQLRAVCLVNKKASPYVSYEAVIHKREQRRKSLEFFRSHELTNEQGDTLDMEDVVNASSSNPAHRRNEMMACVKGLELIAEMRGECAVFYTITCPSRFHATLNNGRPNPKWTSATVRQSSDYLVHMFAAFRKAMHKAGLRWYGVRVAEPHHDGTVHWHLLCFMRKKDRKSITALLRKFAIREDREELGNNTGPRFKSELINPRKGTPTSYIAKYISKNIDGRGLANEISKETGRSLRDNAEHVNAWASLHRVQQFRFFGIPGRQAYRELRLLAGQAARQQADKKAGAPVLDNPRLDAVLAAADAGCFATYIMKQGGVLVPRKHHLVRTAYELNDEPSAYGDHGIRIYGIWSPIIEGRICTHAMKWKMVRKAVDVQEAPADQGACAPWTRGNNCPPVEKMNYFESDLSGEKQLEPLPDFNSMSRKELRELNARLRQVRPKRRKGYKQEINDRLRLQLEHELKSRGFDGSENEIDLLLRGGSIPSGAGLRLFYRNQRLQEDDKWRQWY

SEQ ID NO: 7651 - DNA, 1005 bp, Klebsiella oxytoca
  misc_feature (697)..(697): n is a, c, g or t
atgaagtttttggtcactggtgccgcaggttttatcggcttccatatcgcgcagcgcctgttgaatgaagggcatgatgttgtcggaatcgacaacatgaacgactattatgacgtcagcctgaaacaggcccgtctggatcgcctggcttctccggcattccatttccagcagctggatctggccgaccgtgaaggtatggcaaagctgttcgccacagagcaatttgatcgcgtgatccacctggccgcccaggccggtgtgcgctactcactcgaaaacccgtatgcctacgcagacgctaacctgatggggtatctgaacattctggaaggctgccgtcataccaaggtgaaacacctggtgtacgcctcctccagctcggtttacggcctcaaccgtaaaatgccgttctccaccgaagattccgtcgatcatccggtctccttgtatgccgccaccaagaaagctaatgagctgatggcgcacacctattctcacctgtacggcatcccgaccaccgggctgcgcttctttacagtgtatggtccgtggggtcgcccggatatggcgctgttcaagttcacgaaagcgatgctggaaggaaaaagtatcgacgtttacaactacggcaaaatgaagcgcgacttcacctatatcgacgacatcgtcgaggcggtggttcgggtgcaggatntgttcccgcaggccaatgccgactggaccgttgagagcggttccccggccaccagttccgcgccgtatcgggtatataacattggcaacagctcaccagtggaactgatggactacatcaccgctctggaagaagcgctgggaatggaagcgcagaagaatatgatgccgattcagccgggcgatgtgctggacaccagcgcagatactcaaccgctgtatgacctggtgggctttaagccgcaaacgtcagtgaaggaaggcgtgaagaacttcgtggagtggtacaaggattactatcagatctaa

SEQ ID NO: 7652 - protein, 334 aa, Klebsiella oxytoca
  misc_feature (233)..(233): Xaa can be any naturally occurring amino acid
MKFLVTGAAGFIGFHIAQRLLNEGHDVVGIDNMNDYYDVSLKQARLDRLASPAFHFQQLDLADREGMAKLFATEQFDRVIHLAAQAGVRYSLENPYAYADANLMGYLNILEGCRHTKVKHLVYASSSSVYGLNRKMPFSTEDSVDHPVSLYAATKKANELMAHTYSHLYGIPTTGLRFFTVYGPWGRPDMALFKFTKAMLEGKSIDVYNYGKMKRDFTYIDDIVEAVVRVQDXFPQANADWTVESGSPATSSAPYRVYNIGNSSPVELMDYITALEEALGMEAQKNMMPIQPGDVLDTSADTQPLYDLVGFKPQTSVKEGVKNFVEWYKDYYQI

SEQ ID NO: 7653 - DNA, 831 bp, Morganella morganii
  misc_feature (107)..(107): n is a, c, g or t
atgacagaaaaactcaaatgtgcgctgatttatgattttgacggcaccctggcagaaggtgactgtccggagcacggactgatgcctgcactgggtatcagtgacangaaagcattctggcgggaagtgaagcggtttgccaaagcagatgacggcgacgaaatcctctcctatatgggattactggccgccaaggctgcgaataaaaagtcagaggaactgagcattgaaaacctgaagaaacacggtgcgacgattccgttgtttcccggggtgacagagtggttcagccggatcaatacctgggctcatgagcaggggctggacccggaacactatattctgtccagcggactggacggtatgatccgcggcacggctatcggccatgaattccgcgatatttttgcctgtaaatatcactattccgctgacggaaaaacagcacagtggcctgctcaggctatcaattacaccaccaaaacacagtttttattccggataaacaagggaatacataactcatgggataatgtggctgttaatcattttatcgagcaggaagaacgcgctgtgcagttccgccatatgatctatttcggtgatggtgataccgatatcccggccatgaagatggtgcgttatcagggcggtttctcgctggcggtgtttgatcagaaaaaatggggcaatccggaaacacagaacaaggtcggcaagctgattgcggaagagcgggcaaactatgtggtacccgcaaactatgaggaaggcagccagctggatgtgaccgtaaaagggctgttacagctgttccgccgtaagcgctga

SEQ ID NO: 7654 - protein, 276 aa, Morganella morganii
  misc_feature (36)..(36): Xaa can be any naturally occurring amino acid
MTEKLKCALIYDFDGTLAEGDCPEHGLMPALGISDXKAFWREVKRFAKADDGDEILSYMGLLAAKAANKKSEELSIENLKKHGATIPLFPGVTEWFSRINTWAHEQGLDPEHYILSSGLDGMIRGTAIGHEFRDIFACKYHYSADGKTAQWPAQAINYTTKTQFLFRINKGIHNSWDNVAVNHFIEQEERAVQFRHMIYFGDGDTDIPAMKMVRYQGGFSLAVFDQKKWGNPETQNKVGKLIAEERANYVVPANYEEGSQLDVTVKGLLQLFRRKR

SEQ ID NO: 7655 - DNA, 258 bp, Morganella morganii
  misc_feature (77)..(77): n is a, c, g or t
atgaatttatcccgtcaggaacaacgtaccttacacgttctcgctaaaggtggtcgtatcgcgcaagtccgagatangtctggccgcctcatcgccgttgaatgctacacccgcgaagggctgttgcttaccgactgcacccttgccaccttcaaaaaactcaaaaccaaaaaacttatcaagtccgttaacggtcagccgtaccgcatcaacactaccgggctgaataacgttcgcgcacagcttgataaccgctaa

SEQ ID NO: 7656 - protein, 85 aa, Morganella morganii
  misc_feature (26)..(26): Xaa can be any naturally occurring amino acid
MNLSRQEQRTLHVLAKGGRIAQVRDXSGRLIAVECYTREGLLLTDCTLATFKKLKTKKLIKSVNGQPYRINTTGLNNVRAQLDNR

SEQ ID NO: 7657 - DNA, 1857 bp, Proteus mirabilis
  misc_feature (1130)..(1130): n is a, c, g or t
atgaacccgaaaaatcatgaccagtttcagaacaacttcgccgcattaaacgaaaccgtacaacaagtgactgaacgtattgttgctcgctcacaaataactcgtcgcgcttatctgaaaaaaattgaagctgctaaaagccaaaccgtacaccgtgcccagttagcttgcggtaatttggctcatggttttgccgcctgtcaaagtgaagataaaaatttacttaagaatatggttcataatgatatcgccatcattactgcatataacgatatgttatccgctcataaaccttatgaagattatccacaaaaaattaaagcggcattgcatactgttggcgctgtaggtcaagtcgctggtggtgtgcctgcgatgtgtgatggtgtgacacaagggcaagatggaatggagctatcactgctaagtcgcgatgttattgccatgtctgcagctgtcgggttatctcataatatgtttgatggcgccctttatttagggatctgcgataaaatcgttccagggcttactatggcagcactgtcattcggtcatctgcctgcaatttttgtccctgcaggtccaatgaccagtggtttacccaataaagaaaaggtgcgtattcgccaactgtatgcagaaggcaaggtcgatcgtaatgctttattagaagcagaagcagcctcttaccatagtatgggaacttgtactttttatggtacagcaaactccaatcaaatggtgatggaagcaatgggcttacatttacctggctcctcttttgttcatccagatactccattacgtgaagcattaacagaagcggcagcaaaacaaattgtacgcttaacagaaaactcggggaattatttacctattggtcaattagttgacgaaaaggtgattgttaacggtattattgtgctgttagccacaggtggctcaacaaatctcaccatgcatttagtggcaatggcacgggcggcgggcattatgattaattgggatgatttttctcaattatcacaagttgtgccattaattgctcgtatttatcctaatggtccggcagatattaatcaattccaagcggcaggtggtcttgctcttattattcgtgaattactganaaaaggcttaattcatcgcgatgtcaatacggtggcaggatttggtattgaacgctataccttagagccgtggctaaatgaaggtaaacttgattggcgtgaaggtgcaatacaatctttagataaagatgtgattgccgatatcaatacgccattctcttcacacggcggaacacaggtgatggaaggtaatttaggtcgagcagtgatgaaaacgtcggcggtgcctgatgaaaataaaattattgaagcacctgctgttgtgtttaatagccaacatgatattgccgctaaatttagcgccggtgaattgaataaagattgtgtagtcgttgtgcgttatcaaggtccccaagccaatgggatgccagaattacataaactcatgcctcctttaggggtattgatggataaaggctataaagtggcattagtcacagatggccgtctttctggtgcatcaggtaaagttcctgccgctattcatgtaacaccagaggcggtaaacggtggactattagcaaaagtacaagatggtgacattattcgtgttaatggcaaaacaggtgaattaacactcttagttgatgaacaaaccttagaagctcgccaaaccgaaatacctgatctcagcgcaaacaatagcggttgcggtcgtgagttgttcgttaatttacgtcgccatttatcaggtgctgaacaaggtgcttgctgtattgatttttaa

SEQ ID NO: 7658 - protein, 618 aa, Proteus mirabilis
  misc_feature (377)..(377): Xaa can be any naturally occurring amino acid
MNPKNHDQFQNNFAALNETVQQVTERIVARSQITRRAYLKKIEAAKSQTVHRAQLACGNLAHGFAACQSEDKNLLKNMVHNDIAIITAYNDMLSAHKPYEDYPQKIKAALHTVGAVGQVAGGVPAMCDGVTQGQDGMELSLLSRDVIAMSAAVGLSHNMFDGALYLGICDKIVPGLTMAALSFGHLPAIFVPAGPMTSGLPNKEKVRIRQLYAEGKVDRNALLEAEAASYHSMGTCTFYGTANSNQMVMEAMGLHLPGSSFVHPDTPLREALTEAAAKQIVRLTENSGNYLPIGQLVDEKVIVNGIIVLLATGGSTNLTMHLVAMARAAGIMINWDDFSQLSQVVPLIARIYPNGPADINQFQAAGGLALIIRELLXKGLIHRDVNTVAGFGIERYTLEPWLNEGKLDWREGAIQSLDKDVIADINTPFSSHGGTQVMEGNLGRAVMKTSAVPDENKIIEAPAVVFNSQHDIAAKFSAGELNKDCVVVVRYQGPQANGMPELHKLMPPLGVLMDKGYKVALVTDGRLSGASGKVPAAIHVTPEAVNGGLLAKVQDGDIIRVNGKTGELTLLVDEQTLEARQTEIPDLSANNSGCGRELFVNLRRHLSGAEQGACCIDF

SEQ ID NO: 7659 - DNA, 489 bp, Proteus mirabilis
  misc_feature (274)..(274): n is a, c, g or t
atgctggtggtttctgatatgaaaaaacatcatgtacaaattattcctgctacttatgaacatattgttcgtttattaccacatgtaagacaagctgatgttgatgagttctacgctatgtcaatgcaaacacctgagcaggtattacgacatggcttatctgtttctactaaagcctatgccggcattattaatgatgaagtcgtgactatttttggtgttgcttctggctcattactgactggtttaggtatcccttggctagtggggactnatttattagagcaacaccagaaaacctttctacgacgctgtaaacccatcttaaaacagatgttagggcaatacccaacactgatgaattatgtcgatgaacgtaatcatattgctaaggcgtggctccattggttggggtttcagattgaagaagcaaagccagcaggtttacttcagttacctttccatcgttttacattgagggctaaataa

SEQ ID NO: 7660 - protein, 162 aa, Proteus mirabilis
  misc_feature (92)..(92): Xaa can be any naturally occurring amino acid
MLVVSDMKKHHVQIIPATYEHIVRLLPHVRQADVDEFYAMSMQTPEQVLRHGLSVSTKAYAGIINDEVVTIFGVASGSLLTGLGIPWLVGTXLLEQHQKTFLRRCKPILKQMLGQYPTLMNYVDERNHIAKAWLHWLGFQIEEAKPAGLLQLPFHRFTLRAK

SEQ ID NO: 7661 - DNA, 2265 bp, Pseudomonas aeruginosa
  misc_feature (260)..(260): n is a, c, g or t
atgagcgaatccctcgatctgagcctggaaggggtcgaacgccggtcgttggccgagttcaccgagcaggcctatctgaactattccatgtacgtgatcatggaccgcgccctgccgcatatcggcgacggcctgaaaccggtgcagcgacgcatcgtctacgccatgagcgaactggggctggatgccgattccaagcacaagaagtcggcgcgcaccgtcggcgacgtgctcggcaagttccacccgcacggcgactnggcctgctacgaggccatggtgctgatggcgcagccgttctcctatcgctatccgctggtggacggccagggcaactggggggcgccggacgatcccaagtccttcgccgccatgcgttataccgaggcgcgcctgtcgcgctattccgaggtgctgctcagcgaactgggccagggtaccgtggactgggtaccgaacttcgacggcaccctcgacgagccggccgtgctgccggcccgcctgcccaacctgctgctcaacggcaccaccggcatcgcggtgggcatggccaccgacgtgccgccgcacaacctgcgggaagtcgcgtcggcctgcgtgcgcctgctcgaccagccgggcgcgacggtcgccgaattgtgcgaacacgtgccgggcccggacttccccaccgaagccgagatcatcaccccgcgcgccgacctgcagaaggtctacgagaccggccgcggttcggtgcgcatgcgcgcggtgtaccgcgtcgaggacggcgacatcgtcatccacgccctgccgcaccaggtgtccggttccaaggtgctggaacagatcgccgggcagatgcaggccaagaagctgccgatggtggccgacctgcgcgacgagtcggaccacgagaacccgacccgcatcgtcatcatcccgcgttcgaaccgggtcgatgtcgaagagctgatgacccatctgttcgccaccaccgacctggagaccagctaccgggtcaacctgaacatcatcggcctcgacggcaagccgcaggtcaaggacctgcgccagttgctctcggagtggttgcagttccgcatcggcaccgtgcgtcgacgcctgcagttccgcctggacaaggtcgagcgccgcctgcatctgctggatggcttgctgatcgccttcctcaacctcgacgaggtgatccacatcatccgcaccgaggaccagcccaaggcggtgctgatggagcgcttcgaactcagcgaggtgcaggccgactacatcctcgacacccgcctgcgccagttggcgcgcctggaagagatgaagatccgcggcgagcaggaagagttgctgaaggagcagaagcgcctgcagaccctgctcggcagcgaggccaagctgaagaagctggtgcgcgaggagctgatcaaggatgccgagacctacggcgacgaccgccgttcgccgatcgtcgcccgcgccgaggcccgcgcgctgtcggaaaccgagctgatgcccaccgaaccggtgaccgtggtgctctcggaaaaaggctgggtgcggtgcgccaagggccacgacatcgacgccgccggcctttcctacaaggccggcgacggcttcaaggccgccgcgccgggacgctcgaaccagtatgcggtgttcatcgactccaccgggcgcagctactcgctgccggcccacagcctgccgtccgcgcggggccagggcgagccgctcagcggccggctgacgccgccgccgggggccagcttcgaatgcgtgctgctgccggacgacgatgcgctgttcgtgatcgcttccgacgccggctatggtttcgtggtcaagggcgaggacctgcaggccaagaacaaggccggcaaggccctgctcagcctgcccaacggctccgccgtggtggcgccgcgcccggtgcgcgatgtggagcaggattggctggcggccgtgacgaccgagggccgtctgctattgttcaaggtctccgacctgccgcagctcggcaagggcaagggcaacaagatcatcggcatccccggcgaacgcgtggccagccgcgaggaatacctcaccgacctggctgttctgccagccggggcaacgttggtcctgcaggccggaaagcgtaccctgtcgctcaagggcgacgacctggaacactacaagggggagcggggccggcgaggcaacaagctgccgcgcggtttccagcgcgtcgacagcctgctggtggatattccgccacaggattga

SEQ ID NO: 7662 - protein, 754 aa, Pseudomonas aeruginosa
  misc_feature (87)..(87): Xaa can be any naturally occurring amino acid
MSESLDLSLEGVERRSLAEFTEQAYLNYSMYVIMDRALPHIGDGLKPVQRRIVYAMSELGLDADSKHKKSARTVGDVLGKFHPHGDXACYEAMVLMAQPFSYRYPLVDGQGNWGAPDDPKSFAAMRYTEARLSRYSEVLLSELGQGTVDWVPNFDGTLDEPAVLPARLPNLLLNGTTGIAVGMATDVPPHNLREVASACVRLLDQPGATVAELCEHVPGPDFPTEAEIITPRADLQKVYETGRGSVRMRAVYRVEDGDIVIHALPHQVSGSKVLEQIAGQMQAKKLPMVADLRDESDHENPTRIVIIPRSNRVDVEELMTHLFATTDLETSYRVNLNIIGLDGKPQVKDLRQLLSEWLQFRIGTVRRRLQFRLDKVERRLHLLDGLLIAFLNLDEVIHIIRTEDQPKAVLMERFELSEVQADYILDTRLRQLARLEEMKIRGEQEELLKEQKRLQTLLGSEAKLKKLVREELIKDAETYGDDRRSPIVARAEARALSETELMPTEPVTVVLSEKGWVRCAKGHDIDAAGLSYKAGDGFKAAAPGRSNQYAVFIDSTGRSYSLPAHSLPSARGQGEPLSGRLTPPPGASFECVLLPDDDALFVIASDAGYGFVVKGEDLQAKNKAGKALLSLPNGSAVVAPRPVRDVEQDWLAAVTTEGRLLLFKVSDLPQLGKGKGNKIIGIPGERVASREEYLTDLAVLPAGATLVLQAGKRTLSLKGDDLEHYKGERGRRGNKLPRGFQRVDSLLVDIPPQD

SEQ ID NO: 7663 - DNA, 888 bp, Pseudomonas aeruginosa
  misc_feature (403)..(403): n is a, c, g or t
ttggttcgaccccatttgccgctgaacgccctgcgcgccttcgaagcttcggcccggcacctgagcttcacccgcgcggccatcgagctgtgcgtgacccaggcggcggtcagccaccaggtgaagagcctcgaggagcgtctcggcgtggccctgttcaagcgtctgccgcgcggcctcatgctgacccacgagggcgagagcctgctgccggtgctgtgtgactccttcgaccgcatcgccggcctgctggaacgtttcgagggtggccactaccgggacgtgctcaccgtcggcgcggtcggaaccttcacggtcggttggctgctgccgcggctggaggacttccaggcgcgccatcccttcatcgatctgcgcctgtccacccacaacaaccgcgtcnacatcgccgccgaggggctcgactacgcgatccgcttcggcggcggcgcctggcacggcaccgaggcgctggcgttgttcgaggcgccgctgacggtgctctgctgcccggaggtcgccgcccagttgcacagtcccgccgacctgctgcagcacaccctgctgcgctcctaccgcgccgacgagtggccgctgtggttccaggcggccggactgccggcgcacgcgccactgacccggagcatcgtcttcgacacctcgctggccatgctcgaggcggcccgccagggtgtcggcgtggccctggcgccggcggcgatgtttgcccggcaactggccagcgagagcatccggcgtccgttcgccaccgaagtgagtaccggcagctactggctgacgcgcttgcagtcgcggggggagaccagcgcgatgctggcgttcagggagtggttgctgggccaggccgtcttggagagcgaggcgtag

SEQ ID NO: 7664 - protein, 295 aa, Pseudomonas aeruginosa
  misc_feature (135)..(135): Xaa can be any naturally occurring amino acid
MVRPHLPLNALRAFEASARHLSFTRAAIELCVTQAAVSHQVKSLEERLGVALFKRLPRGLMLTHEGESLLPVLCDSFDRIAGLLERFEGGHYRDVLTVGAVGTFTVGWLLPRLEDFQARHPFIDLRLSTHNNRVXIAAEGLDYAIRFGGGAWHGTEALALFEAPLTVLCCPEVAAQLHSPADLLQHTLLRSYRADEWPLWFQAAGLPAHAPLTRSIVFDTSLAMLEAARQGVGVALAPAAMFARQLASESIRRPFATEVSTGSYWLTRLQSRGETSAMLAFREWLLGQAVLESEA

SEQ ID NO: 7665 - DNA, 1194 bp, Pseudomonas aeruginosa
  misc_feature (716)..(716): n is a, c, g or t
atgcgcgataccagattcccctgcctgtgcggcatcgccgcttccacactgctgttcgccaccaccccggccattgccggcgaggccccggcggatcgcctgaaggcactggtcgacgccgccgtacaaccggtgatgaaggccaatgacattccgggcctggccgtagccatcagcctgaaaggagaaccgcattacttcagctatgggctggcctcgaaagaggacggccgccaggtgacgccggagaccctgttcgagatcggctcggtgagcaagaccttcaccgccaccctcgccggctatgccctggcccaggacaagatgcgcctcgacgaccgcgccagccagcactggccggcactgcagggcagccgcttcgacggcatcagcctgctcgacctcgcgacctataccgccggcggcttgccgctgcagttccccgactcggtgcagaaggaccaggcacagatccgcgactactaccgccagtggcagccgacctatgcgccgggcagccagcgcctctattccaacccgagcatcggcctgttcggctatctcgccgcgcgcagcctgggccagccgttcgaacgactcatggagcagcaagtgttcccggcactgggcctcgaacagacccacctcgacgtgcccgaggcggcgctggcgcagtacgcccagggctacggcaaggacgaccgcccgctacgggncggtcccggcccgctggatgccgaaggctacggggtgaagaccagcgcggccgacctgctgcgcttcgtcgatgccaacctgcatccggagcgcctggacaggccctgggcgcaggcgctcgatgccacccatcgcggttactacaaggtcggcgacatgacccagggcctgggctgggaagcctacgactggccgatctccctgaagcgcctgcaggccggcaactcgacgccgatggcgctgcaaccgcacaggatcgccaggctgcccgcgccacaggcgctggagggccagcgcctgctgaacaagaccggttccaccaacggcttcggcgcctacgtggcgttcgtcccgggccgcgacctgggcctggtgatcctggccaaccgcaactatcccaatgccgagcgggtgaagatcgcctacgccatcctcagcggcctggagcagcagggcaaggtgccgctgaagcgctga

SEQ ID NO: 7666 - protein, 397 aa, Pseudomonas aeruginosa
  misc_feature (239)..(239): Xaa can be any naturally occurring amino acid
MRDTRFPCLCGIAASTLLFATTPAIAGEAPADRLKALVDAAVQPVMKANDIPGLAVAISLKGEPHYFSYGLASKEDGRQVTPETLFEIGSVSKTFTATLAGYALAQDKMRLDDRASQHWPALQGSRFDGISLLDLATYTAGGLPLQFPDSVQKDQAQIRDYYRQWQPTYAPGSQRLYSNPSIGLFGYLAARSLGQPFERLMEQQVFPALGLEQTHLDVPEAALAQYAQGYGKDDRPLRXGPGPLDAEGYGVKTSAADLLRFVDANLHPERLDRPWAQALDATHRGYYKVGDMTQGLGWEAYDWPISLKRLQAGNSTPMALQPHRIARLPAPQALEGQRLLNKTGSTNGFGAYVAFVPGRDLGLVILANRNYPNAERVKIAYAILSGLEQQGKVPLKR

SEQ ID NO: 7667 - DNA, 1308 bp, Pseudomonas aeruginosa
  misc_feature (631)..(631): n is a, c, g or t
atgagtaccccgaaacgcctgcacatcggcatgtcgctggcccccacctggctcagcggcgatgcctggcggcgccccgacagcaatatcgaaggcatcttcggcagcgatttcgccgtcgacatcgccaggcgctccgaagccgcccacctcgacttcgtgtttcgcccggacgtcagcagcctgccactggacgtgctggagaccggctccggcttcgccagcctggatcccaccgtactgcttgccgcggtcgcccgcgaaacctcgcggatcggcctggtgtcgacgatctccaccacgttctatccgccctacgtggtggcccggcagctgcaatcgctgcactggatcagcaacggccgcgccggctggaacatcgtcaccgcgctgcagggccacgagaacttcggcctggacgcgatgcccgatgcggagcagcgctacgcgcgcgccgccgagttcacccggctggtgcacgacctgtgggacagcttcccccgcgaggcactcctggtcgaccgcgagagcggccgctacgccgacgtttcccgggtgcacccggtcgaccacgacggcgaattcctcaaggtcaagggaccgctcaacctgccggccttcggcgaggcgnggattcccctggtgcaggccggcgcctccgagagcgggcgcgacttcgccgcctcggtggccgacctggtgttcgcgccgaccccggacaaggaggctgccctggaactgcgccgcgacctttcccgccgcgccgaacgccacggtcgctcgccgcgcgacgtgcgcctgctgccgggcttcagcctgtacctggcggagagccgcgaggaggcgcgggaaatcttcatgcagacccacgcgcgcctggaccgcgcgcgcaagttcgccacgatcaggcagatgctcggcctcgacctcagcgactggccgctggaccggccgatttccgcggccgacctgccgccgccggtggccgaccccggcagccgcacccacaccgacctgctgcggcgcctgatcgagcgcgagacgttacgcctggaccagttgctgctgcgccccgaggtggtttccgcggcgcactggcaggtcatcggtacggtggacgatgccgtcgagcagatcgtcgactgggccgccgccggcgccatggacggtttcatcgccgcgccgggaggctcggtcggctcgctgcggctgttcctcgaacaggtggtgccgcgcctggtggagaaggggctgttccgcgagcgctacagcgccactaccttcgccgggcacctggcagaggaatga

SEQ ID NO: 7668 - protein, 435 aa, Pseudomonas aeruginosa
  misc_feature (211)..(211): Xaa can be any naturally occurring amino acid
MSTPKRLHIGMSLAPTWLSGDAWRRPDSNIEGIFGSDFAVDIARRSEAAHLDFVFRPDVSSLPLDVLETGSGFASLDPTVLLAAVARETSRIGLVSTISTTFYPPYVVARQLQSLHWISNGRAGWNIVTALQGHENFGLDAMPDAEQRYARAAEFTRLVHDLWDSFPREALLVDRESGRYADVSRVHPVDHDGEFLKVKGPLNLPAFGEAXIPLVQAGASESGRDFAASVADLVFAPTPDKEAALELRRDLSRRAERHGRSPRDVRLLPGFSLYLAESREEAREIFMQTHARLDRARKFATIRQMLGLDLSDWPLDRPISAADLPPPVADPGSRTHTDLLRRLIERETLRLDQLLLRPEVVSAAHWQVIGTVDDAVEQIVDWAAAGAMDGFIAAPGGSVGSLRLFLEQVVPRLVEKGLFRERYSATTFAGHLAEE

SEQ ID NO: 7669 - DNA, 1434 bp, Salmonella enterica
  misc_feature (758)..(758): n is a, c, g or t
atgtccacatcagatagttgttataatacgggttacatattacgcatctgcgcgattgccgcactgggcggaatattatttggctacgatactgctgttatttcaggtgcgattggttcactgaccagctactttcatctatctcctgctgagaccggctgggcggtttcctgcgttgtggtggggtgcgttattggttcgtttagcgccggatatttatccaaacgttttggacgcaagaaatcattgatggtttcagcgctgttattcactatttccgcagtgggcacctccctctcctacacgttcacccattttgtgatttatcgcattatcggtggactggcagtcggcctggcggcaacagtatcaccgatgtatatgtctgaagtctcaccgaaaaacatgcgcggcagagcattaagtatgcagcagttcgctatcgttttcggtcagattctgatcttctacgttaactacaaaatagcatcgattgcagcggatacctggctcattgaacttggctggcgctatatgtttgctgcgggtattattccctgcattttgttctgtattttagtctttttaatcccggaatctccccgctggatgatgatgattggtcgcgaggaggagacgctaaaaatactgaccaaaatatccaacgaagaacatgccagacatcttcttgccgatataaaaacctcactgcaaaatgaccaactaaacgcccatcaaaaactcaattaccgcgacgngaacgtgcgtttcatcctgattctgggctgcatgatcgctatgctgcaacaggtaacaggggttaacgtcatgatgtattacgcgccaatcgtccttaaggatgtgaccggtagcgcccaggaggccctgttccagacaatctggatcggcgtgattcagcttatcggttccattattggcgcaatgattatggataagatggggcgtttgtcgctgatgcgtaaaggcactattggcagcatcatcggcttgttgctcacttcatgggcgctgtacagccaggcaaccggttatttcgcgctatttggtatgctgttctttatgattttctacgcgctttcctggggcgtgggcgcatgggtgcttatttctgaaatattccctaaccggatgaggtcgcagggaatgagtatttcggtcggatttatgtggatggcaaactttttagtttcgcaattcttcccgatgattaatgaaaacccgtatttactttcgcatttccacggcgcatttccaatgtggatattcgccatctgctgcatcttcagttacttctttatctgccgttacctgccggaaacaaaaggcatttcgctggagaaaatggagagcgtagtgttagcaaaacgcaggaaaaaactgcagccaattcaaaccgaacgttattctgattaa

SEQ ID NO: 7670 - protein, 477 aa, Salmonella enterica
  misc_feature (253)..(253): Xaa can be any naturally occurring amino acid
MSTSDSCYNTGYILRICAIAALGGILFGYDTAVISGAIGSLTSYFHLSPAETGWAVSCVVVGCVIGSFSAGYLSKRFGRKKSLMVSALLFTISAVGTSLSYTFTHFVIYRIIGGLAVGLAATVSPMYMSEVSPKNMRGRALSMQQFAIVFGQILIFYVNYKIASIAADTWLIELGWRYMFAAGIIPCILFCILVFLIPESPRWMMMIGREEETLKILTKISNEEHARHLLADIKTSLQNDQLNAHQKLNYRDXNVRFILILGCMIAMLQQVTGVNVMMYYAPIVLKDVTGSAQEALFQTIWIGVIQLIGSIIGAMIMDKMGRLSLMRKGTIGSIIGLLLTSWALYSQATGYFALFGMLFFMIFYALSWGVGAWVLISEIFPNRMRSQGMSISVGFMWMANFLVSQFFPMINENPYLLSHFHGAFPMWIFAICCIFSYFFICRYLPETKGISLEKMESVVLAKRRKKLQPIQTERYSD

SEQ ID NO: 7671 - DNA, 1290 bp, Serratia marcescens
  misc_feature (241)..(241): n is a, c, g or t
atgatgaaacgcacgttttccgcactgttgctgttctccacgctccccgccctggcggcggaacccgccgcttccccctggaaaaacatcccgttgggcgatgcggccaccctgtctttcgacggttcactgcgcgagcgctatgaatggacggatcaacgcgatctgagcggcggacgcgacgacaccttcatgcagcgcctgctgattggcgcgcgcctcgactatggcgacgactttngcgcctatgtccagttgggatcgtcactggccacgccgcgcgatcgcgggcgcaaaccgaccgacgaagatcatgcctatctcggccagggctatgtggacttaaaactgcccaccgcctatggcctcggcaccctgcgggtcggccgccaggagattgcgctgggttcgctgcacctgatgggcacccgcgacggccccaacgtgcgtcgttctttcgacgccatccgcgccagctgggccaaggataaaaaccgcctcgacgcctttatcggccaccccgtcaccctcaaaaccggcagtttcgacgacgataccgacaacagccaaaaggtgtgggggctgtacggcaccacgccgctggcagcgctggcgtcctcgctcgatctctacacctttggctttgaggataacgacgcccactacgcgcagctcagcgggcaagaacggcgctataccgtcggcgcgcgcattttcggcgcggcgcaggggttcgactgggataatgaagccgcctggcagttcggcagcgcagaacagcgcgacatccgcgcctggtcggcgtcggcgcacgccgggtataggatgagcgactggcgctggcagccgcgctttggcggcaagattggcatcgccagcggcgataaaaacggtcacgatgggcagctcaatacctttaacgccatgtaccccaagctgccctacctgaccgaaaacgggctggtggcgccggctaacctgatcgccattcatccttcggtcacgattacgccgtggcaaaccctggccatcgacttcagttgggacgcgttgtggcggcaacgccgcgaggatgccttctacctcgggccgatgcgcccggtgaagggcagcgcgcagggctcgcgctttatcggcaatcagtatcaggtcgaaaccatctggacgccgcgcagcgatctccagttcaaggtggcctatgtctacttcgacgtcggccacagcctgcagcaacatgccgggctgaaaaacatgaacttcgtcctggcgcagggcacctacagtttttaa

SEQ ID NO: 7672 - protein, 429 aa, Serratia marcescens
  misc_feature (81)..(81): Xaa can be any naturally occurring amino acid
MMKRTFSALLLFSTLPALAAEPAASPWKNIPLGDAATLSFDGSLRERYEWTDQRDLSGGRDDTFMQRLLIGARLDYGDDFXAYVQLGSSLATPRDRGRKPTDEDHAYLGQGYVDLKLPTAYGLGTLRVGRQEIALGSLHLMGTRDGPNVRRSFDAIRASWAKDKNRLDAFIGHPVTLKTGSFDDDTDNSQKVWGLYGTTPLAALASSLDLYTFGFEDNDAHYAQLSGQERRYTVGARIFGAAQGFDWDNEAAWQFGSAEQRDIRAWSASAHAGYRMSDWRWQPRFGGKIGIASGDKNGHDGQLNTFNAMYPKLPYLTENGLVAPANLIAIHPSVTITPWQTLAIDFSWDALWRQRREDAFYLGPMRPVKGSAQGSRFIGNQYQVETIWTPRSDLQFKVAYVYFDVGHSLQQHAGLKNMNFVLAQGTYSF

SEQ ID NO: 7673 - DNA, 1011 bp, Serratia marcescens
  misc_feature (176)..(176): n is a, c, g or t
atgaaattcctggttacaggcgccgcagggtttattggttatcacgttgcagagcgtttgttgaccgccgggcatcaggttgtcggcatcgataacctgaatgactattatgacgtgggcctgaaaacggcccgtctggacagactggcggataagccgggattccgctttatcangctggatttggccgatcgcgaaggcatggcggcattgttcgctgagcatcagtttcagcgcgtcattcatttgggcgcgcaagccggcgtgcgttattcgctggtcaacccgttggcttatgcggacgccaacctgatcggccatttgaacgtgctggaaggctgccggcataataaggtcgagcatttactttacgcgtcctccagctctgtttatggcctcaatcgcaagctgccgtttgctaccgaagattctgtcgaccaccctgtgtcactgtatgcggcaaccaaaaaagccaatgagctgatgtcacacagctactctcatttatacggtcttccgacgacggggctgcgcttctttaccgtatatggtccctgggggcgtccggatatggcgctgttcaagtttaccaaggccatattggcgggggagagcatcgatgtatataaccacggtgaaatgcaccgtgactttacttacattgatgatatcaccgaggcgattgtgcggctgcaggcggttattccgcaggcagatccgtcatggaccgttgaacagggatcgccggcgaccagttccgcgccgtatcatgtttataatatcggcaataactcccccgttaaactgatggaatatatcacggcattggagcaggctttgggggtaacggcccgcaagaatatgctgccgatgcaacctggcgacgtgatggataccagcgcggataccgcagagctttatcgtgacattggttttaagccggaaaccagcgttgaagagggtgtgaagcgctttgttgattggtataaggcattctaccaggttcaataa

SEQ ID NO: 7674 - protein, 336 aa, Serratia marcescens
  misc_feature (59)..(59): Xaa can be any naturally occurring amino acid
MKFLVTGAAGFIGYHVAERLLTAGHQVVGIDNLNDYYDVGLKTARLDRLADKPGFRFIXLDLADREGMAALFAEHQFQRVIHLGAQAGVRYSLVNPLAYADANLIGHLNVLEGCRHNKVEHLLYASSSSVYGLNRKLPFATEDSVDHPVSLYAATKKANELMSHSYSHLYGLPTTGLRFFTVYGPWGRPDMALFKFTKAILAGESIDVYNHGEMHRDFTYIDDITEAIVRLQAVIPQADPSWTVEQGSPATSSAPYHVYNIGNNSPVKLMEYITALEQALGVTARKNMLPMQPGDVMDTSADTAELYRDIGFKPETSVEEGVKRFVDWYKAFYQVQ

SEQ ID NO: 7675 - DNA, 615 bp, Serratia marcescens
  misc_feature (31)..(31): n is a, c, g or t
atgacggagaatccgcaacttaccgcattgntggcggcctgccactggattggcaacaaaggctggtgcccggcgaccggcggcaacatgtcgctgcgcctggacgaacgtcagtgcctggtcaccgagtccggcaaagacaagggtagcctgagcgccgccgattttctgcgggtggatattgccgacaatcatgtgccgagcggccgcacgccgtcggcggagaccgggctgcatacgctgctctatcgcctgtctgcgcatatcggcgcggtgctgcatactcattccgtcaacgctaccgtcctgtcgcgggtggaacgcggcgatgcgctggtgctgcaggggtacgaaatgcagaagtcgctggccggccagcgcagccacctggacagcgtggcgatccccatattcgacaacgatcaggatatccctcggctggcggcgcgcgtggcggcctatgccgaggccacgccgctgcaatacggctttctggtgcgcggccacggtctgtattgctggggaagccaggtggcggaagctcgccgccatcttgaagggctggaattcttgttccagtgtgaactgcaacgccgtttactggaggcgaaatga

SEQ ID NO: 7676 - protein, 204 aa, Serratia marcescens
  misc_feature (11)..(11): Xaa can be any naturally occurring amino acid
MTENPQLTALXAACHWIGNKGWCPATGGNMSLRLDERQCLVTESGKDKGSLSAADFLRVDIADNHVPSGRTPSAETGLHTLLYRLSAHIGAVLHTHSVNATVLSRVERGDALVLQGYEMQKSLAGQRSHLDSVAIPIFDNDQDIPRLAARVAAYAEATPLQYGFLVRGHGLYCWGSQVAEARRHLEGLEFLFQCELQRRLLEAK

SEQ ID NO: 7677 - DNA, 3891 bp, Serratia marcescens
  misc_feature (1834)..(1834): n is a, c, g or t
atggaaattctgcgtggttcgcccgctttatcggcttttcgcattaccaaactgctgtcccgctgccaggacgctcacctgcccgtcagtgatatctacgccgagtacgtccactttgccgatgttagcgcaccgctcagtgccgaagaacacgccaagcttcagcggctgctcaagtacggcccttctctcgccgaacacgcccccgaaggccggttgctgctggttacgccgcgtccgggcaccatttctccctggtcttccaaagccaccgacatcgcccacaactgcggtctgcagcaggtcgtgcgcctggagcgcggcctggcgttctacgtcaaggcgcccgagctgacggaaacccagtggcggcagctcgccgcgctgctgcacgatcgcatgatggaaaccgtcttcagcgaactgcaacaggccgaacagctgttcgcgcaccatcagccggcgccgtatcagtcggtcgacgtgctgggcgcagggcgcgccgcgctggagcaggccaacgtccggctcggcctggcgctggcgcaggacgagatcgactatctgctgaatgcctttaccggtttggggcgcaacccgacggatatcgaactttatatgttcgcgcaggccaactccgagcactgccgccacaagattttcaacgccgactggatcatcgacggcgaacagcagcctaaatcgctgttcaaaatgatcaagaacacctatgagcagacgccggactatgtgctgtcggcgtataaagacaacgctgccgtgatggaaggctcgcaggtcggccgcttcttcgccgcgccggagaccggcacctacgattaccatcaggaagacgcgcacatcctgatgaaggtggaaacccacaaccacccgacggcgatctcgccgtggccgggcgccgcgaccggctccggcggcgagatccgcgacgagggggctaccggccgcggcgccaagccgaaggccggcctggtgggcttctcggtgtccaacctgcgtattcccggctttgaacagccgtgggaacaggatttcggcaagccggaacgcatcgtcaccgcgctggatatcatgaccgaaggcccgctgggcggcgcggcgttcaacaacgaattcggtcgtccggcgctgctgggctacttccgtacctatgaagagcgcgtcaacagccacaacggcgttgagctgcgcggctaccacaaaccgatcatgctggcgggcggcatcggcaacatccgtgccgatcacgtgcagaaaggggaaatcaccgtcggcgccaagctggtggtgttgggcggcccggcgatgaatatcggcctgggcggcggcgcggcctcgtcgatggcgtccggccagtccgacgccgatctggacttcgcttcggtgcagcgcgacaacccggaaatggagcgccgctgtcaggaagtgatcgaccgctgctggcagctgggcgatcagaacccgatcctgtttatccatgacgtcggcgccggcggcctgtccaacgccatgccggagctggtgagcgacggcggccgcggcggccgcttcgagctgcgcgatattctcaacgacgagccgggcatgagcccgctggaagtgtggtgcaacgaatcgcaggaacgttacgtgatggcgatcgccccggcgcagatggcgcagttcgacgagatctgccgccgcgagcgcgcgccttatgcggtgatcggcgaagcgaccgaagaacagcacctgacgctcaacgaccgccacttcgacaaccagccgatcgacatgccgctggacgtactgctcggcaagacgccgaaaatgncccgcgacgtcacccgcctgcaggcgagcggcgaggcggtgcagcgcgagaacatcacgctggccgacgcggtgaaacgcgtgctgcatctgccggccgtggcggagaaaaccttcctgatcaccatcggcgaccgcaccgttaccggcatggtggcgcgcgaccagatggtcggcccgtggcagatcccggtggccgactgtgcggtcaccaccgccagcctggacagctattacggcgaagcgatgtcgctcggtgaacgcgcgccggtggcgctgctggacttcgccgcctccggccgcctggcggtcggggaagcgctgaccaacctggccgccacagagatcggtagcctgaagcgcgtgaagctgtccgccaactggatggccgccgccggccacccgggcgaagacgccggcctgtacgaagcggtaaaagcggtgggcgaagaactgtgcccggcgctgggcatcactatcccggtgggtaaagactccatgtcgatgaagacccgctggcaggaaggcaacgaacagcgtgaaatgacctcgccgctgtcgctggtcatcaccgccttcgcccgcgtggaggacgtgcgccacaccgtgacgccgcagttgcgcaccgataagggcgacagcgcgctgctgttgatcgatctgggcaacggccataacgcgctgggtgccaccgcgctggcgcaggtttatcgccaactgggtgacaaaccagccgacgtgcgcaacgttgcgcagctggcgggcttcttcaacgccatgcagcagctggtggccgatcaagcgctgttggcttaccacgaccgcgccgacggcggcctgctggtgacgctggcggagatggccttcgccggtcactgcggcgtggacgtcaaccttgacggcctcggcgatgatgcgctggcggtgctgttcaacgaagagctgggcgcggtgatccaggtgagcgccgaacgtctcgatgacgtgaagcaggcgttcgctcagcacggtctgaccgacaatgtgcatcacatcggcagcgtgcaggccggcgatcgtttcgtcatcacccaacacggcaaggcgctgtacagcgaaagccgcaatacgctgcgcacctggtgggcggaaaccacctggcagatgcagcgcctgcgcgacaacccggcgtgcgccgatcaggaacatcaggccaagcaggatgaacaagatcccggcctgaatgtgaagctgaccttcgcaccgcaggaagacatcgccgcgccgtatatcgccaagggcgctcgcccgaaagtggcggtgctgcgtgagcagggggtgaactcccacgttgaaatggcggcggcgttccaccgcgccggctttgacgcggtggacgtgcacatgagcgatctgctggcggggcgccgcgatctgcaggacttccacacgctggtggcctgcggtggcttctcttacggcgacgtactgggcgccggcgaaggctgggcgaagtccatcctgttcaacgagcgggtgcgcgacgagttcgaagcgttcttccaccgtccgcagacgctggcgctgggcgtgtgcaacggctgccagatgatgtccaacctgcgcgagctgatcccgggcgccgaacactggccgcgctttgtgcgcaacctgtcggatcgcttcgaggcgcgtttcagcctggtggaagtggcggccagcccgtcgctgttcctgcagggcatgaccggttcgcgcatgccgatcgccgtttcccacggcgaggggcatgttgaagtgcgcgatgcggcgcatctggccgcgctggaaagccacggcctggtggcgctgcgtttcgtcaacaacgccggtcaggtgacggaaacttacccggccaacccgaacggttcgccgaacggcattaccgccgtgaccagcgccaacgggcgcgccacggtgatgatgccgcacccggaacgtgtgttccgcaccgtcagcaactcctggcacccggaagagtggggcgaggacagcccgtggatgcgcatgttccgcaacgcccgtaagcagctgggctaa

SEQ ID NO: 7678 - protein, 1296 aa, Serratia marcescens
  misc_feature (612)..(612): Xaa can be any naturally occurring amino acid
MEILRGSPALSAFRITKLLSRCQDAHLPVSDIYAEYVHFADVSAPLSAEEHAKLQRLLKYGPSLAEHAPEGRLLLVTPRPGTISPWSSKATDIAHNCGLQQVVRLERGLAFYVKAPELTETQWRQLAALLHDRMMETVFSELQQAEQLFAHHQPAPYQSVDVLGAGRAALEQANVRLGLALAQDEIDYLLNAFTGLGRNPTDIELYMFAQANSEHCRHKIFNADWIIDGEQQPKSLFKMIKNTYEQTPDYVLSAYKDNAAVMEGSQVGRFFAAPETGTYDYHQEDAHILMKVETHNHPTAISPWPGAATGSGGEIRDEGATGRGAKPKAGLVGFSVSNLRIPGFEQPWEQDFGKPERIVTALDIMTEGPLGGAAFNNEFGRPALLGYFRTYEERVNSHNGVELRGYHKPIMLAGGIGNIRADHVQKGEITVGAKLVVLGGPAMNIGLGGGAASSMASGQSDADLDFASVQRDNPEMERRCQEVIDRCWQLGDQNPILFIHDVGAGGLSNAMPELVSDGGRGGRFELRDILNDEPGMSPLEVWCNESQERYVMAIAPAQMAQFDEICRRERAPYAVIGEATEEQHLTLNDRHFDNQPIDMPLDVLLGKTPKMXRDVTRLQASGEAVQRENITLADAVKRVLHLPAVAEKTFLITIGDRTVTGMVARDQMVGPWQIPVADCAVTTASLDSYYGEAMSLGERAPVALLDFAASGRLAVGEALTNLAATEIGSLKRVKLSANWMAAAGHPGEDAGLYEAVKAVGEELCPALGITIPVGKDSMSMKTRWQEGNEQREMTSPLSLVITAFARVEDVRHTVTPQLRTDKGDSALLLIDLGNGHNALGATALAQVYRQLGDKPADVRNVAQLAGFFNAMQQLVADQALLAYHDRADGGLLVTLAEMAFAGHCGVDVNLDGLGDDALAVLFNEELGAVIQVSAERLDDVKQAFAQHGLTDNVHHIGSVQAGDRFVITQHGKALYSESRNTLRTWWAETTWQMQRLRDNPACADQEHQAKQDEQDPGLNVKLTFAPQEDIAAPYIAKGARPKVAVLREQGVNSHVEMAAAFHRAGFDAVDVHMSDLLAGRRDLQDFHTLVACGGFSYGDVLGAGEGWAKSILFNERVRDEFEAFFHRPQTLALGVCNGCQMMSNLRELIPGAEHWPRFVRNLSDRFEARFSLVEVAASPSLFLQGMTGSRMPIAVSHGEGHVEVRDAAHLAALESHGLVALRFVNNAGQVTETYPANPNGSPNGITAVTSANGRATVMMPHPERVFRTVSNSWHPEEWGEDSPWMRMFRNARKQLG

SEQ ID NO: 7679 - DNA, 810 bp, Serratia marcescens
  misc_feature (151)..(151): n is a, c, g or t
atgtcagcagaacaatccgtactgaatcagaatgccgaaccggactggaagaattacgacgattttgcgcgcggtatcgacactaaccggctgccgggcactcaggattggcgcggcaaaacgctgcagatcgcttttgaaagcagcgggnaaatcacgttgcgcttcagcgccgatcggcagcgggtgctgtgggcctggggcggggagagcggcgaggacgcttacgaagaggtgcaaacctccgccgcgcgctatttcttcaatattccgctgcagtcgccgggcaacgagtgcctgacgctggtactcaatcgtgacagcggccgggcgctgctggtgcgcagcacgctgttgccggaacaggcggtggaaaagggatcccgcctcaagcaaagcttccacgtcggccggattgtcggcgccacgccgggtggcgtcgcgccgcatctgacccgcgagcttatcggctatcgcacgctgaatgtctacagccccaaccactattacgaacatttctatgtcaacaccgagcgctacgcctggcaaaatctgcgcggcgaacaattcggccacggcgacatggactacgccacctactacaagtttgaggacgagatgttcctgttcaccttccgggaaaagatcatcccggtgtgctcggtgttcttcttcgactttatttccgggcgctgcaccggcaccttcctcgggctggacgccgccggccgggtgttggtgtcaccggccggggccttcatcagcaagatgagctataacgcctacccggaaggcgtgcagccgctttga

SEQ ID NO: 7680 - protein, 269 aa, Serratia marcescens
  misc_feature (51)..(51): Xaa can be any naturally occurring amino acid
MSAEQSVLNQNAEPDWKNYDDFARGIDTNRLPGTQDWRGKTLQIAFESSGXITLRFSADRQRVLWAWGGESGEDAYEEVQTSAARYFFNIPLQSPGNECLTLVLNRDSGRALLVRSTLLPEQAVEKGSRLKQSFHVGRIVGATPGGVAPHLTRELIGYRTLNVYSPNHYYEHFYVNTERYAWQNLRGEQFGHGDMDYATYYKFEDEMFLFTFREKIIPVCSVFFFDFISGRCTGTFLGLDAAGRVLVSPAGAFISKMSYNAYPEGVQPL

SEQ ID NO: 7681 - DNA, 195 bp, Shigella sonnei
  misc_feature (173)..(173): n is a, c, g or t
atgaacaagcagcagcaagccgtactcaacatggcaggattcataaaaagccaaagcctgacgctgctcgaaaagctggacgcactcgatgctgacgaacaggctaccatgtgtgagaagctgcacgaactcgcagaagaactccagaacagcatccagacacgctttgaagnagaaaatagcacagagagataa

SEQ ID NO: 7682 - protein, 64 aa, Shigella sonnei
  misc_feature (58)..(58): Xaa can be any naturally occurring amino acid
MNKQQQAVLNMAGFIKSQSLTLLEKLDALDADEQATMCEKLHELAEELQNSIQTRFEXENSTER
